(19) United States
(12) Patent Application Publication
(10) Pub. No.: US 2024/0368565 A1
(43) Pub. Date: Nov. 7, 2024

(54) COMPLEMENTATION-BASED TAGS AND REPORTERS FOR DUAL-MODALITY LABELING

(71) Applicant: Promega Corporation, Madison, WI (US)

(72) Inventors: Michael KILLORAN, Madison, WI (US); Rahele Esmatpour, Madison, WI (US); Lance P. Encell, Madison, WI (US); Christopher Todd Eggers, Madison, WI (US); Nina J. Bonde, Madison, WI (US)

(21) Appl. No.: 18/655,005

(22) Filed: May 3, 2024

Related U.S. Application Data
(60) Provisional application No. 63/500,118, filed on May 4, 2023.

(51) Int. Cl. C12N 9/02; C12N 9/14; G01N 33/58

(52) U.S. Cl. CPC C12N 9/0069; C12N 9/14; G01N 33/582; G01N 33/583; C12Y 113/12007

(57) ABSTRACT

Provided herein are compositions and systems comprising complementation-based tags and reporters for labeling and detection of targets by luminescence and a second modality (e.g., fluorescence), and methods of use thereof. In particular, tags are provided comprising the fusion of a first component of bioluminescent complex and a first component of modified dehalogenase complex, reporters are provided comprising the second component of bioluminescent complex and the second component of modified dehalogenase complex, and systems and methods are provided comprising the tags and reporters herein for dual-modality labeling and detection of targets.

### CROSS-REFERENCE TO RELATED APPLICATIONS

[0001] The present invention claims the priority benefit of U.S. Provisional Patent Application 63/500,118, filed May 4, 2023, which is incorporated by reference in its entirety.

### SEQUENCE LISTING

[0002] The text of the computer readable sequence listing filed herewith, titled “PRMG_41898_202_SequenceListing.xml,” created on May 3, 2024, having a file size of 4,666,369 bytes, is hereby incorporated by reference in its entirety.

### FIELD

[0003] Provided herein are compositions and systems comprising complementation-based tags and reporters for labeling and detection of targets by luminescence and a second modality (e.g., fluorescence), and methods of use thereof. In particular, tags are provided comprising the fusion of a first component of bioluminescent complex and a first component of modified dehalogenase complex, reporters are provided comprising the second component of bioluminescent complex and the second component of modified dehalogenase complex, and systems and methods are provided comprising the tags and reporters herein for dual-modality labeling and detection of targets.

### BACKGROUND

[0004] Reporter technologies based on complementation of split protein sequences have proven utility across a broad range of biomedical applications. In their most common configuration, these reporters function by initially providing little or no signal generation under conditions where their complementary sequences are kept separate, or their interaction is unfavorable. Upon changing conditions that enable interaction, such as through chemical induction, physical proximity, altered concentration, or affinity, the sequences interact with one another and fold into an active protein complex that generates a measurable signal, for example, in the form of luminescence or fluorescence.

[0005] The utility of split protein complementation systems as research tools has been demonstrated in their application for biosensing, diagnostics, drug discovery, targeted molecular degradation, cell and molecular imaging, and detection of energy transfer (BRET, FRET), among other examples. The capabilities of these research tools can be targeted to specific molecular events through fusion of the split protein sequences to intracellular proteins, providing simple yet robust versatility in the methods and the design of their application. The emergence of CRISPR genome editing technology has further increased the value small-sized (<35 amino acids) split protein sequences for use as fusion tags, since their small size enables more efficient integration into the genome and makes them less likely to disrupt the function of the targeted protein fusion partner.

[0006] Several examples of asymmetric split protein reporters with small sequences have been reported, including fluorescent proteins (GFP, RFP), luciferases (NanoLuc), and self-labeling proteins (HaloTag, SNAP-tag). Introduction of these reporters as fusions to endogenous genes using CRISPR-based genome editing has been demonstrated to result in many of the functional capabilities outlined above. However, despite the utility and versatility of these split protein tags, users have to select a single detection method (e.g., fluorescence or luminescence) and subsequently commit to generating assays or engineered cell lines that are limited to the advantages and disadvantages of the chosen detection type. For example, while luminescence-based detection, for example, with NanoLuc Binary Technology (NANOBIT) has exceptional sensitivity and linearity, it has not been widely adopted for cellular imaging or flow cytometry due to the difficulty of luminescence detection with typical microscopy or cytometry detection instrumentation. Additional methods where fluorescence is utilized preferentially over bioluminescence for imaging include the following: single molecule tracking, localization, fixation, single cell/sub-cellular resolution, and colocalization experiments using multiple colors.

[0007] Conversely, while small, split fluorescent protein tags can be used for fluorescence microscopy or cytometry, they are often limited in their dynamic range and available emission wavelengths for measurement.

[0008] What is needed is a single, split protein technology that provides use of both luminescence and fluorescence for detection of complementation between a tag and a complementary reporter sequence. Such a system would enable users to measure the functional dynamics of a protein target of interest under minimally disruptive conditions while realizing the benefits of both detection methods.

### SUMMARY

[0009] Provided herein are compositions and systems comprising complementation-based tags and reporters for labeling and detection of targets by luminescence and a second modality (e.g., fluorescence), and methods of use thereof. In particular, tags are provided comprising the fusion of a first component of bioluminescent complex and a first component of modified dehalogenase complex, reporters are provided comprising the second component of bioluminescent complex and the second component of modified dehalogenase complex, and systems and methods are provided comprising the tags and reporters herein for dual-modality labeling and detection of targets. In some embodiments, provided herein is a dual luminescence-fluorescence detection technology based on the fusion of split NanoLuc® (LgBit and SmBiT/HiBiT) and split HaloTag® (LgHT and SmHT) sequences. Embodiments of such configurations maintain: (1) a single, small-sized tag comprising a fusion between SmHT and SmBiT/HiBiT sequences and (2) a complementary reporter polypeptide comprising a fusion between LgHT and LgBiT sequences. The advantages provided such embodiments are initially realized through introduction of the small sized fusion tag, for example the SmHT-HiBiT tag, to a protein target of interest. Once tagged, detection of the protein target through its high affinity, spontaneous interaction with a LgHT-LgBiT reporter polypeptide reconstitutes a “detection complex” comprised of reconstituted and active NanoLuc® and HaloTag® complexes. In the non-complemented/non-complexed state, the dual peptide tag is not capable of generating a signal, providing a zero-background state not attainable when using full length fluorescence proteins. The higher binding affinity between LgBiT and HiBiT drives the interaction between LgHT and SmHT via induced proximity. Introduction of luciferase substrate and a fluorescent HaloTag ligand, respectively, results in separate luminescent and fluorescent signals that can be configured to enable multiple functional measurements or assay types. The high affinity complementation with the LgHT-LgBiT detection polypeptide provides the advantage of choosing which detection modality is the most beneficial under the circumstances without the need to change the tag fused to the protein target.

[0010] While selection of detection modality is an example of the simplicity and versatility offered by the technology, another advantage is the potential to sequentially or simultaneously measure both signals in the same reaction or within the same cells, contained in a single tube or microplate well, since the fluorescence and luminescence signals can be detected separately and do not interfere with each other. For example, tagged target protein expression levels can be sensitively quantitated with the luminescence of the active split NanoLuc® component of the complex, while its sub-cellular localization measured with fluorescence microscopy of the active split HaloTag component of the complex. These measurements can be configured in multiplex, homogeneous, live cell assays without the need for lysis, washing, or purification steps. In these examples, LgBiT or LgHT, or a fusion between the two, is produced inside of the cell where the tags or dual tag is being detected. However, this system could also be used for in vitro biochemical or cell lytic formats where the dual peptide tag is produced as a fusion to a target gene and detected in lytic format by recombinant LgBiT, LgHT, or a LgBiT-LgHT fusion.

[0011] Various embodiments herein include different substrates for the detection complexes, particularly for HaloTag® ligands, where many modified chloroalkanes have been described with dyes that fluoresce (in fluorogenic or non-fluorogenic fashion) at wavelengths across the visible and near IR spectrum as well as non-fluorescent ligands with a host of functionalities (e.g., mechanical and biological sensors, chemically-induced proximity, targeted degradation and post-translational modification, energy transfer, etc.). This provides a distinct advantage over a similar competitive technology with a small tag, split fluorescent proteins (GFP, RFP), since split FPs can only emit at one wavelength and do not offer the non-fluorescent labeling functionalities of HaloTag. Together, the advantages provided by dual luminescence and fluorescence detection using a small fusion tag and a single complementary detection polypeptide, along with the versatility offered by their substrates, imparts a broad set of advantages underlying individual technologies while providing new capabilities that can only be realized by configuring them together.

[0012] In some embodiments, provided herein are dual-reporter systems comprising: (a) a tandem peptide tag comprising (i) a peptide component of bioluminescent complex fused to (ii) a peptide component of modified dehalogenase complex; and (b) a tandem polypeptide reporter comprising (i) a polypeptide component of the bioluminescent complex and (ii) a polypeptide component of the modified dehalogenase complex; wherein the peptide component and the polypeptide component of the bioluminescent complex are capable of interacting to form the bioluminescent complex, and wherein the bioluminescent complex is capable of producing bioluminescence in the presence of a substrate for the bioluminescent complex; and wherein the peptide component and the polypeptide component of the modified dehalogenase complex are capable of interacting to form the modified dehalogenase complex, and wherein the modified dehalogenase complex is capable of forming a covalent bond with a haloalkyl ligand. In some embodiments, systems further comprise a substrate for the bioluminescent complex. In some embodiments, systems further comprise a haloalkyl ligand. In some embodiments, the haloalkyl ligand comprises a haloalkane moiety linked to a fluorophore. In some embodiments, the tandem peptide tag is linked to a target element (e.g., cellular target, protein, peptide, etc.). In some embodiments, the tandem peptide tag and the target element are expressed within a cell as a fusion.

[0013] In some embodiments, provided herein are tandem peptide tags comprising a peptide component of bioluminescent complex fused to a peptide component of modified dehalogenase complex; wherein the peptide component of the bioluminescent complex is capable of interacting with a polypeptide component of the bioluminescent complex to form the bioluminescent complex, and wherein the bioluminescent complex is capable of producing bioluminescence in the presence of a substrate for the bioluminescent complex; and wherein the peptide component of the modified dehalogenase complex is capable of interacting with a polypeptide component of the modified dehalogenase complex to form the modified dehalogenase complex, and wherein the modified dehalogenase complex is capable of forming a covalent bond with a haloalkyl ligand.

[0014] In some embodiments provided herein are systems comprising the tandem peptide tags herein and a polypeptide component of the bioluminescent complex. In some embodiments, systems further comprise a substrate for the bioluminescent complex. In some embodiments, systems further comprise a polypeptide component of the modified dehalogenase complex. In some embodiments, systems further comprise a haloalkyl ligand. In some embodiments, the polypeptide component of the modified dehalogenase complex and the polypeptide component of the bioluminescent complex are present in the system as independent reporter polypeptides. In some embodiments, the polypeptide component of the modified dehalogenase complex and the polypeptide component of the bioluminescent complex are present in the system as a tandem polypeptide reporter.

[0015] In some embodiments, provided herein are systems comprising a tandem peptide tag herein and a polypeptide component of the modified dehalogenase complex. In some embodiments, systems further comprise a substrate for the bioluminescent complex.

[0016] In some embodiments, provided herein are tandem polypeptide reporters comprising a polypeptide component of the bioluminescent complex and a polypeptide component of the modified dehalogenase complex; wherein the polypeptide component of the bioluminescent complex is capable of interacting with a peptide component of the bioluminescent complex to form the bioluminescent complex, and wherein the bioluminescent complex is capable of producing bioluminescence in the presence of a substrate for the bioluminescent complex; and wherein the polypeptide component of the modified dehalogenase complex is capable of interacting with a peptide component of the modified dehalogenase complex to form the modified dehalogenase complex, and wherein the modified dehalogenase complex is capable of forming a covalent bond with a haloalkyl ligand.

[0017] In some embodiments, provided herein are systems comprising a tandem peptide reporter herein and a peptide component of the bioluminescent complex. In some embodiments, systems further comprise a substrate for the bioluminescent complex. In some embodiments, systems further comprise a peptide component of the modified dehalogenase complex. In some embodiments, systems further comprise a haloalkyl ligand. In some embodiments, the peptide component of the modified dehalogenase complex and the peptide component of the bioluminescent complex are present in the system as independent reporter polypeptides. In some embodiments, the peptide component of the modified dehalogenase complex and the peptide component of the bioluminescent complex are present in the system as a tandem polypeptide reporter.

[0018] In some embodiments, provided herein are systems comprising a tandem polypeptide reporter herein and a peptide component of the modified dehalogenase complex. In some embodiments, systems further comprise a substrate for the bioluminescent complex.

[0019] In some embodiments, provided herein are methods of detecting a component of interest in a system, the method comprising: (a) linking the component of interest to a tandem peptide tag comprising a peptide component of bioluminescent complex fused to a peptide component of modified dehalogenase complex, wherein the peptide component of the bioluminescent complex is capable of interacting with a polypeptide component of the bioluminescent complex to form the bioluminescent complex, wherein the bioluminescent complex is capable of producing bioluminescence in the presence of a substrate for the bioluminescent complex, wherein the peptide component of the modified dehalogenase complex is capable of interacting with a polypeptide component of the modified dehalogenase complex to form the modified dehalogenase complex, and wherein the modified dehalogenase complex is capable of forming a covalent bond with a haloalkyl ligand; (b) contacting the component of interest linked to the tandem peptide tag with a polypeptide component of a modified dehalogenase complex under condition such that the modified dehalogenase complex is formed; (c) contacting the modified dehalogenase complex with a haloalkyl ligand comprising a haloalkane linked to a fluorophore; and (d) detecting fluorescence.

[0020] In some embodiments, provided herein are methods of detecting a component of interest in a system, the method comprising: (a) linking the component of interest to a tandem peptide tag comprising a peptide component of bioluminescent complex fused to a peptide component of modified dehalogenase complex, wherein the peptide component of the bioluminescent complex is capable of interacting with a polypeptide component of the bioluminescent complex to form the bioluminescent complex, wherein the bioluminescent complex is capable of producing bioluminescence in the presence of a substrate for the bioluminescent complex, wherein the peptide component of the modified dehalogenase complex is capable of interacting with a polypeptide component of the modified dehalogenase complex to form the modified dehalogenase complex, and wherein the modified dehalogenase complex is capable of forming a covalent bond with a haloalkyl ligand; (b) contacting the component of interest linked to the tandem peptide tag with a polypeptide component of a bioluminescent complex under condition such that the bioluminescent complex is formed; (c) contacting the bioluminescent complex with a substrate for the bioluminescent complex; and (d) detecting bioluminescence.

[0021] In some embodiments, provided herein are methods of detecting a component of interest in a system, the method comprising: (a) linking the component of interest to a tandem peptide tag comprising a peptide component of bioluminescent complex fused to a peptide component of modified dehalogenase complex, wherein the peptide component of the bioluminescent complex is capable of interacting with a polypeptide component of the bioluminescent complex to form the bioluminescent complex, wherein the bioluminescent complex is capable of producing bioluminescence in the presence of a substrate for the bioluminescent complex, wherein the peptide component of the modified dehalogenase complex is capable of interacting with a polypeptide component of the modified dehalogenase complex to form the modified dehalogenase complex, and wherein the modified dehalogenase complex is capable of forming a covalent bond with a haloalkyl ligand; (b) contacting the component of interest linked to the tandem peptide tag with a tandem polypeptide reporter comprising (i) the polypeptide component of a bioluminescent complex and (ii) the polypeptide component of a modified dehalogenase complex under condition such that the bioluminescent complex and modified dehalogenase complexes are formed; (c) contacting the bioluminescent complex with a substrate for the bioluminescent complex and/or a haloalkyl ligand comprising a haloalkane linked to a fluorophore; and (d) detecting bioluminescence and/or fluorescence.

[0022] In some embodiments, provided herein are methods of detecting a component of interest in a system, the method comprising: (a) linking the component of interest to a tandem peptide tag comprising a peptide component of bioluminescent complex fused to a peptide component of modified dehalogenase complex, wherein the peptide component of the bioluminescent complex is capable of interacting with a polypeptide component of the bioluminescent complex to form the bioluminescent complex, wherein the bioluminescent complex is capable of producing bioluminescence in the presence of a substrate for the bioluminescent complex, wherein the peptide component of the modified dehalogenase complex is capable of interacting with a polypeptide component of the modified dehalogenase complex to form the modified dehalogenase complex, and wherein the modified dehalogenase complex is capable of forming a covalent bond with a haloalkyl ligand; (b) contacting the component of interest linked to the tandem peptide tag with independent polypeptides comprising (i) the polypeptide component of a bioluminescent complex and (ii) the polypeptide component of a modified dehalogenase complex under condition such that the bioluminescent complex and modified dehalogenase complexes are formed; (c) contacting the bioluminescent complex with a substrate for the bioluminescent complex and/or a haloalkyl ligand comprising a haloalkane linked to a fluorophore; and (d) detecting bioluminescence and/or fluorescence.

### BRIEF DESCRIPTION OF THE DRAWINGS

[0023] FIG. 1. Cartoon depiction of an exemplary embodiment of the dual tag/reporter technology described herein.

[0024] FIG. 2. Complementation of split HaloTag using the SmHT-HiBiT fusion. E. coli lysates expressing HaloTag[23-297]—FRB were combined with lysates expressing FKBP-SmHT with the indicated modifications (+/−HiBiT tag) and incubated with or without Rapamycin for 2 hours. Fluorescence activity of each combination was measured following addition JF646 HaloTag ligand to the mixture and incubation for 1 hour. SmHT refers to the HaloTag[3-19] fragment.

[0025] FIG. 3. Complementation of split HaloTag using the SmHT-HiBiT fusion. E. coli lysates expressing HaloTag[22-297](Q145H+P154)-FRB was combined with lysates expressing FKBP-SmHT with the indicated modifications (+/−HiBiT tag) and incubated with or without Rapamycin for 2 hours. Fluorescence activity of each combination was measured following addition JF646 HaloTag ligand to the mixture and incubation for 1 hour. SmHT refers to the HaloTag[3-19] fragment.

[0026] FIG. 4. Complementation of split HaloTag using the SmHT-HiBiT fusion. E. coli lysates expressing HaloTag[23-297]—FRB were combined with lysates expressing FKBP-SmHT with the indicated modifications (+/−HiBiT tag) and incubated with or without Rapamycin for 2 hours. Fluorescence activity of each combination was measured following addition JF646 HaloTag ligand to the mixture and incubation for 1 hour. Fold response was calculated as the fluorescence with Rapamycin divided by the fluorescence without Rapamycin. SmHT refers to the HaloTag[3-19] fragment.

[0027] FIG. 5. Complementation of split HaloTag using the SmHT-HiBiT fusion. E. coli lysates expressing HaloTag[22-297](Q145H+P154)-FRB was combined with lysates expressing FKBP-SmHT with the indicated modifications (+/−HiBiT tag) and incubated with or without Rapamycin for 2 hours. Fluorescence activity of each combination was measured following addition JF646 HaloTag ligand to the mixture and incubation for 1 hour. Fold response was calculated as the fluorescence without Rapamycin subtracted from the fluorescence with Rapamycin. SmHT refers to the HaloTag[3-19] fragment.

[0028] FIG. 6. Luminescence activity of the SmHT-HiBiT fusion tags when complemented with LgBiT. Purified LgBiT protein and Furimazine substrate was added to E. coli lysates expressing FKBP-SmHT with the indicated modifications (+/−HiBiT tag) following incubation with or without Rapamycin for 2 hours. Luminescence activity of each combination was measured after 20 minute incubation. SmHT refers to the HaloTag[3-19] fragment.

[0029] FIG. 7. Detection of the SmHT-HiBiT fusion tag through facilitated complementation and the LgHT-LgBiT detection polypeptide. E. coli lysates expressing HaloTag[22-297(M2F)]—FRB or HaloTag[22-297(M2F)]-LgBiT were combined with lysates expressing FKBP-SmHT with the indicated modifications (+/−HiBiT tag) and incubated with or without Rapamycin for 2 hours. Fluorescence activity of each combination was measured following addition JF646 HaloTag ligand to the mixture and incubation for 1 hour. SmHT refers to the HaloTag[3-19] fragment.

[0030] FIG. 8. Detection of the SmHT-HiBiT fusion tag through facilitated complementation and the LgHT-LgBiT detection polypeptide. E. coli lysates expressing HaloTag[22-297(Q145H+P154R)]—FRB or HaloTag[22-297](Q145H+P154R)-LgBiT was combined with lysates expressing FKBP-SmHT with the indicated modifications (+/−HiBiT tag) and incubated with or without Rapamycin for 2 hours. Fluorescence activity of each combination was measured following addition JF646 HaloTag ligand to the mixture and incubation for 1 hour. SmHT refers to the HaloTag[3-19] fragment.

[0031] FIG. 9. Detection of the SmHT-HiBiT fusion tag with luminescence following facilitated complementation and the LgHT-LgBiT detection polypeptide. E. coli lysates expressing the indicated LgHT-FRB or LgHT-LgBiT fusions were combined with lysates expressing FKBP-SmHT with the indicated modifications (+/−HiBiT tag) and incubated with or without Rapamycin for 2 hours. Following measurement for fluorescence activity by addition JF646 HaloTag ligand to the mixture and incubation for 1 hour, the mixture was diluted 1:10, Furimazine was added, and the luminescence activity measured. SmHT refers to the HaloTag[3-19] fragment.

[0032] FIG. 10. Detection of synthetic SmHT-HiBiT peptide with the LgHT-LgBiT detection polypeptide. E. coli lysates expressing HaloTag[22-297(M2F)]-LgBiT or HaloTag[22-297(Q145H+P174R)]-LgBiT were combined with a concentration range of synthetic SmHT-HiBiT peptide and incubated for 2 hours. Fluorescence activity of each combination was measured following addition JF646 HaloTag ligand to the mixture and incubation for 1 hour. For each combination, the lowest fluorescence intensity was used as the baseline for subtraction for all datapoints in order to enable nonlinear curve fitting and calculation of affinity. SmHT refers to the HaloTag[3-19] fragment.

[0033] FIG. 11. Detection of synthetic SmHT-HiBiT peptide with the LgHT-LgBiT detection polypeptide. E. coli lysates expressing HaloTag[22-297(M2F)]-LgBiT or HaloTag[22-297(Q145H+P174R)]-LgBiT were combined with a concentration range of synthetic SmHT-HiBiT peptide and incubated for 2 hours. Luminescence activity of each combination was measured following the addition of furimazine to the mixture and incubation for 20 minutes. SmHT refers to the HaloTag[3-19] fragment.

[0034] FIG. 12. Effects of varying HaloTag[3-19]-HiBiT internal linker lengths as C-terminal fusions to FKBP on luminescence activity in E. coli lysates. Constructs with varying internal linker lengths separating the HaloTag[3-19], and HiBiT sequences were expressed as C-terminal FKBP fusions in E. coli lysates. FKBP fusion-expressing lysates were combined with E. coli lysates expressing LgBiT, HaloTag[22-297](M2F)-12×Gly/Ser-LgBiT, or LgBiT-12×Gly/Ser-HaloTag[22-297](M2F). Reactions were incubated for 30 minutes at room temperature. Fluorofurimazine substrate was added to the reaction 5 minutes prior to luminescence detection.

[0035] FIG. 13. Effects of varying HaloTag[3-19]-HiBiT internal linker length on fluorescence activity in E. coli lysates. Constructs with varying internal linker lengths separating the HaloTag[3-19], and HiBiT sequences were expressed as C-terminal FKBP fusions in E. coli lysates. FKBP fusion-expressing lysates were combined with E. coli lysates expressing HaloTag[22-297](M2F)-12×Gly/Ser-LgBiT or LgBiT-12×Gly/Ser-HaloTag[22-297](M2F). Reactions were incubated for 30 minutes at room temperature. JF646 HaloTag ligand was added to the lysate mixture, and the reaction was incubated for an additional 2 hours at room temperature prior to fluorescence detection.

[0036] FIG. 14. Effects of varying HaloTag[3-19]-HiBiT internal linker length on fold response in fluorescence activity in E. coli lysates. Constructs with varying internal linker lengths separating the HaloTag[3-19], and HiBiT sequences were expressed as C-terminal FKBP fusions in E. coli lysates. FKBP fusion-expressing lysates were combined with E. coli lysates expressing HaloTag[22-297](M2F)-12×Gly/Ser-LgBiT or LgBiT-12×Gly/Ser-HaloTag[22-297](M2F). Reactions were incubated for 30 minutes at room temperature. JF646 HaloTag ligand was added to the lysate mixture, and the reaction was incubated for an additional 2 hours at room temperature prior to fluorescence detection. Fold response was calculated by dividing raw fluorescence readings for each reaction containing FKBP fusion and polypeptide reporter lysate by the fluorescence reading of polypeptide reporter lysate alone.

[0037] FIG. 15. Effects of varying internal HaloTag[3-19]-HiBiT linker lengths for N-terminal tags on luminescence activity in E. coli lysates. Constructs with varying internal linker lengths separating the HaloTag[3-19], and HiBiT sequences were expressed as N-terminal FKBP fusions in E. coli lysates. FKBP fusion-expressing lysates were combined with E. coli lysates expressing LgBiT, HaloTag[22-297](M2F)-12×Gly/Ser-LgBiT, or LgBiT-12×Gly/Ser-HaloTag[22-297](M2F). Reactions were incubated for 30 minutes at room temperature. Reactions were diluted 10-fold into buffer, and fluorofurimazine substrate was added to the diluted reaction 5 minutes prior to luminescence detection.

[0038] FIG. 16. Effects of varying internal HaloTag[3-19]-HiBiT linker lengths for N-terminal fusions to FKBP on fluorescence activity in E. coli lysates. Constructs with varying internal linker lengths separating the HaloTag[3-19], and HiBiT sequences were expressed as N-terminal FKBP fusions in E. coli lysates. FKBP fusion-expressing lysates were combined with E. coli lysates expressing HaloTag[22-297](M2F)-12×Gly/Ser-LgBiT or LgBiT-12×Gly/Ser-HaloTag[22-297](M2F). Reactions were incubated for 30 minutes at room temperature. JF646 HaloTag ligand was added to the lysate mixture, and the reaction was incubated for an additional 2 hours at room temperature prior to fluorescence detection.

[0039] FIG. 17. Effects of varying internal HaloTag[3-19]-HiBiT linker lengths for N-terminal fusions to FKBP on fold response in fluorescence activity in E. coli lysates. Constructs with varying internal linker lengths separating the HaloTag[3-19], and HiBiT sequences were expressed as N-terminal FKBP fusions in E. coli lysates. FKBP fusion-expressing lysates were combined with E. coli lysates expressing HaloTag[22-297](M2F)-12×Gly/Ser-LgBiT or LgBiT-12×Gly/Ser-HaloTag[22-297](M2F). Reactions were incubated for 30 minutes at room temperature. JF646 HaloTag ligand was added to the lysate mixture, and the reaction was incubated for an additional 2 hours at room temperature prior to fluorescence detection. Fold response was calculated by dividing raw fluorescence readings for each reaction containing FKBP fusion and polypeptide reporter lysate by the fluorescence reading of polypeptide reporter lysate alone.

[0040] FIG. 18. Effects of varying HaloTag[3-19]-HiBiT internal linker length and composition on luminescence activity in E. coli lysates. Constructs with varying internal linker lengths and compositions separating the HaloTag[3-19], and HiBiT sequences were expressed as C-terminal FKBP fusions in E. coli lysates. FKBP fusion-expressing lysates were combined with E. coli lysates expressing LgBiT, HaloTag[22-297](M2F)-12×Gly/Ser-LgBiT, or LgBiT-12×Gly/Ser-HaloTag[22-297](M2F). Reactions were incubated for 30 minutes at room temperature. Fluorofurimazine substrate was added to the reaction 5 minutes prior to luminescence detection.

[0041] FIG. 19. Effects of varying HaloTag[3-19]-HiBiT internal linker length and composition on fluorescence activity in E. coli lysates. Constructs with varying internal linker lengths separating the HaloTag[3-19], and HiBiT sequences were expressed as C-terminal FKBP fusions in E. coli lysates. FKBP fusion-expressing lysates were combined with E. coli lysates expressing HaloTag[22-297](M2F)-12×Gly/Ser-LgBiT or LgBiT-12×Gly/Ser-HaloTag[22-297](M2F). Reactions were incubated for 30 minutes at room temperature. JF646 HaloTag ligand was added to the lysate mixture, and the reaction was incubated for an additional 2 hours at room temperature prior to fluorescence detection.

[0042] FIG. 20. Effects of varying linker length between FKBP and HaloTag[3-19]-HiBiT C-terminal fusions on luminescence activity in E. coli lysates. Constructs with varying linker lengths separating FKBP and HaloTag[3-19]-HiBiT were expressed in E. coli lysates. FKBP fusion-expressing lysates were combined with E. coli lysates expressing LgBiT, HaloTag[22-297](M2F)-12×Gly/Ser-LgBiT, or LgBiT-12×Gly/Ser-HaloTag[22-297](M2F). Reactions were incubated for 30 minutes at room temperature. Fluorofurimazine substrate was added to the reaction 5 minutes prior to luminescence detection.

[0043] FIG. 21. Effects of varying linker length between FKBP and HaloTag[3-19]-HiBiT C-terminal fusions on fluorescence activity in E. coli lysates. Constructs with varying linker lengths separating FKBP and HaloTag[3-19]-HiBiT were expressed in E. coli lysates. FKBP fusion-expressing lysates were combined with E. coli lysates expressing LgBiT, HaloTag[22-297](M2F)-12×Gly/Ser-LgBiT, or LgBiT-12×Gly/Ser-HaloTag[22-297](M2F). Reactions were incubated for 30 minutes at room temperature. JF646 HaloTag ligand was added to the lysate mixture, and the reaction was incubated for an additional 2 hours at room temperature prior to fluorescence detection.

[0044] FIG. 22. Effects of varying linker length between N-terminal HaloTag[3-19]-HiBiT fusions to FKBP on luminescence activity in E. coli lysates. Constructs with varying linker lengths separating FKBP and HaloTag[3-19]-HiBiT were expressed in E. coli lysates. FKBP fusion-expressing lysates were combined with E. coli lysates expressing LgBiT, HaloTag[22-297](M2F)-12×Gly/Ser-LgBiT, or LgBiT-12×Gly/Ser-HaloTag[22-297](M2F). Reactions were incubated for 30 minutes at room temperature. Reactions were diluted 10-fold in buffer, and fluorofurimazine substrate was added to the diluted reaction 5 minutes prior to luminescence detection.

[0045] FIG. 23. Effects of varying linker length between N-terminal HaloTag[3-19]-HiBiT fusions to FKBP on fluorescence activity in E. coli lysates. Constructs with varying linker lengths separating FKBP and HaloTag[3-19]-HiBiT were expressed in E. coli lysates. FKBP fusion-expressing lysates were combined with E. coli lysates expressing LgBiT, HaloTag[22-297](M2F)-12×Gly/Ser-LgBiT, or LgBiT-12×Gly/Ser-HaloTag[22-297](M2F). Reactions were incubated for 30 minutes at room temperature. JF646 HaloTag ligand was added to the lysate mixture, and the reaction was incubated for an additional 2 hours at room temperature prior to fluorescence detection.

[0046] FIG. 24. Effects of HaloTag[3-19] truncation on luminescence activity in E. coli lysates. HaloTag[3-19]-HiBiT constructs containing HaloTag[3-19] truncations were expressed in E. coli lysates as C-terminal fusions to FKBP. FKBP fusion-expressing lysates were combined with E. coli lysates expressing LgBiT, HaloTag[22-297](M2F)-12×Gly/Ser-LgBiT, or LgBiT-12×Gly/Ser-HaloTag[22-297](M2F). Reactions were incubated for 30 minutes at room temperature. Fluorofurimazine substrate was added to the reaction 5 minutes prior to luminescence detection.

[0047] FIG. 25. Effects of HaloTag[3-19] truncation on fluorescence activity of HaloTag[3-19]-HiBiT in E. coli lysates. HaloTag[3-19]-HiBiT constructs containing HaloTag[3-19] truncations were expressed in E. coli lysates as C-terminal fusions to FKBP. FKBP fusion-expressing lysates were combined with E. coli lysates expressing HaloTag[22-297](M2F)-12×Gly/Ser-LgBiT or LgBiT-12×Gly/Ser-HaloTag[22-297](M2F). Reactions were incubated for 30 minutes at room temperature. JF646 HaloTag ligand was added to the lysate mixture, and the reaction was incubated for an additional 2 hours at room temperature prior to fluorescence detection.

[0048] FIG. 26. Effects of HiBiT mutations on luminescence activity of HaloTag[3-19]-HiBiT in E. coli lysates. HaloTag[3-19]-HiBiT constructs containing HiBiT mutations were expressed in E. coli lysates as FKBP fusions. FKBP fusion-expressing lysates were combined with E. coli lysates expressing LgBiT, HaloTag[22-297](M2F)-12×Gly/Ser-LgBiT, or LgBiT-12×Gly/Ser-HaloTag[22-297](M2F). Reactions were incubated for 30 minutes at room temperature. Fluorofurimazine substrate was added to the reaction 5 minutes prior to luminescence detection.

[0049] FIG. 27 Effects of HiBiT mutations on fluorescence activity of HaloTag[3-19]-HiBiT in E. coli lysates. HaloTag[3-19]-HiBiT constructs containing HiBiT mutations were expressed in E. coli lysates as C-terminal fusions to FKBP. FKBP fusion-expressing lysates were combined with E. coli lysates expressing HaloTag[22-297](M2F)-12×Gly/Ser-LgBiT or LgBiT-12×Gly/Ser-HaloTag[22-297](M2F). Reactions were incubated for 30 minutes at room temperature. JF646 HaloTag ligand was added to the lysate mixture, and the reaction was incubated for an additional 2 hours at room temperature prior to fluorescence detection.

[0050] FIG. 28. Effects of HaloTag[3-19]-HiBiT variants on enhancement of LgBiT luminescence across a range of synthetic peptide concentrations. Titrations of HaloTag[3-19]-HiBiT synthetic peptide variants containing mutations (bolded) from the native sequence (EIGTGFPFDPHYVEVLG) were added to purified LgBiT-6×His protein. Reactions were incubated for 30 minutes at 4° C. Furimazine substrate was added to the reaction immediately prior to measuring luminescence. Peptides in this experiment are conjugated to biotin at the N-terminus.

[0051] FIG. 29. Effects of HaloTag[3-19]-HiBiT variants on enhancement of HaloTag[22-297](M2F+K140E)-12×Gly/Ser-LgBiT-6×His luminescence across a range of synthetic peptide concentrations. Titrations of HaloTag[3-19]-HiBiT variants synthetic peptides containing mutations (bolded) from the native sequence (EIGTGFPFDPHYVEVLG) were added to purified HaloTag[22-297](M2F+K140E)-12×Gly/Ser-LgBiT-6×His protein. Reactions were incubated for 30 minutes at 4° C. Furimazine substrate was added to the reaction immediately prior to measuring luminescence. Peptides in this experiment are conjugated to biotin at the N-terminus.

[0052] FIG. 30. Effects of HaloTag[3-19]-HiBiT variants on luminescence enhancement of HaloTag[22-297](M2F+K140E)-12×Gly/Ser-LgBiT-6×His across a range of peptide concentrations. Titrations of HaloTag[3-19]-HiBiT synthetic peptides containing mutations (bolded) from the native sequence (EIGTGFPFDPHYVEVLG) were added to purified HaloTag[22-297](M2F+K140E)-12×Gly/Ser-LgBiT-6×His protein. Reactions were incubated for 30 minutes at 4° C. Furimazine substrate was added to the reaction immediately prior to measuring luminescence. Peptides in this experiment are conjugated to biotin at the N-terminus.

[0053] FIG. 31. Effects of HaloTag[3-19]-HiBiT variants on enhancement of HaloTag[22-297](M2F)-12×Gly/Ser-LgBiT-6×His luminescence across a range of synthetic peptide concentrations. Titrations of HaloTag[3-19]-HiBiT variant synthetic peptides containing sequence mutations or additional linker residues (both bolded) from the native sequence (EIGTGFPFDPHYVEVLG) were added to purified HaloTag[22-297](M2F)-12×Gly/Ser-LgBiT-6×His protein. Reactions were incubated for 30 minutes at 4° C. Furimazine substrate was added to the reaction immediately prior to measuring luminescence.

[0054] FIG. 32. Effects of HaloTag[3-19]-HiBiT variants on luminescence enhancement of HaloTag[22-297](M2F)-12×Gly/Ser-LgBiT-6×His across a range of synthetic peptide concentrations. Titrations of HaloTag[3-19]-HiBiT variant synthetic peptides containing mutations (bolded) from the native sequence (EIGTGFPFDPHYVEVLG) were added to purified HaloTag[22-297](M2F)-12×Gly/Ser-LgBiT-6×His protein. Reactions were incubated for 30 minutes at 4° C. Furimazine substrate was added to the reaction immediately prior to measuring luminescence.

[0055] FIG. 33. Effects of HaloTag[3-19]-HiBiT variants on enhancement of HaloTag[22-297](M2F+K140E)-12×Gly/Ser-LgBiT-6×His fluorescence across a range of synthetic peptide concentrations. Titrations of HaloTag[3-19]-HiBiT variant synthetic peptides containing mutations (bolded) from the native sequence (EIGTGFPFDPHYVEVLG) were added to purified HaloTag[22-297](M2F+K140E)-12×Gly/Ser-LgBiT-6×His protein. Reactions were incubated for 30 minutes at 4° C. JF646 HaloTag ligand was added to each reaction, and fluorescence was measured after 30 minutes room temperature incubation with ligand. Peptides in this experiment are conjugated to biotin at the N-terminus.

[0056] FIG. 34. Effects of HaloTag[3-19]-HiBiT variants on enhancement of HaloTag[22-297](M2F+K140E)-12×Gly/Ser-LgBiT fluorescence of when complemented with synthetic peptides across a range of peptide concentrations. Titrations of HaloTag[3-19]-HiBiT variant synthetic peptides containing mutations (bolded) from the native sequence (EIGTGFPFDPHYVEVLG) were added to purified HaloTag[22-297](M2F+K140E)-12×Gly/Ser-LgBiT-6×His protein. Reactions were incubated for 30 minutes at 4° C. JF646 HaloTag ligand was added to each reaction, and fluorescence was measured after 30 minutes room temperature incubation with ligand. Peptides in this experiment are conjugated to biotin at the N-terminus.

[0057] FIG. 35. Effects of HaloTag[3-19]-HiBiT variants on enhancement of HaloTag[22-297](M2F+K140E)-12×Gly/Ser-LgBiT fluorescence across a range of synthetic peptide concentrations. Titrations of HaloTag[3-19]-HiBiT variant synthetic peptides containing mutations (bolded) from the native sequence (EIGTGFPFDPHYVEVLG) were added to purified HaloTag[22-297](M2F+K140E)-12×Gly/Ser-LgBiT-6×His protein. Reactions were incubated for 30 minutes at 4° C. JF646 HaloTag ligand was added to each reaction, and fluorescence was measured after 30 minutes room temperature incubation with ligand.

[0058] FIG. 36. Effects of HaloTag[3-19]-HiBiT variants on fluorescence of HaloTag[22-297](M2F+K140E)-12×Gly/Ser-LgBiT-6×His across a range of synthetic peptide concentrations. Titrations of HaloTag[3-19]-HiBiT variant synthetic peptides containing mutations (bolded) from the native sequence (EIGTGFPFDPHYVEVLG) were added to purified HaloTag[22-297](M2F+K140E)-12×Gly/Ser-LgBiT-6×His protein. Reactions were incubated for 30 minutes at 4° C. JF646 HaloTag ligand was added to each reaction, and fluorescence was measured after 30 minutes room temperature incubation with ligand.

[0059] FIG. 37. Effects of HaloTag[3-19] variants on fluorescence intensity of HaloTag[22-297](M2F)-12×Gly/Ser-LgBiT-6×His across a range of synthetic peptide concentrations. Titrations of HaloTag[3-19] synthetic peptides containing mutations (bolded) or deletions (denoted by a dash) from the native sequence (SEQ ID NO: 3061: EIGTGFPFDPHYVEVLG) were added to an E. coli lysate expressing HaloTag[22-297](M2F)-12×Gly/Ser-LgBiT. Reactions were incubated for 2 hours at room temperature. JF646 HaloTag ligand was added to the synthetic peptide/lysate mixtures, and the reaction was incubated for an additional 1.5 hours at room temperature prior to fluorescence detection.

[0060] FIG. 38. Effects of HaloTag[3-19] variants on fluorescence intensity of HaloTag[22-297](M2F)-12×Gly/Ser-LgBiT across a range of synthetic peptide concentrations. Titrations of HaloTag[3-19] synthetic peptides containing mutations (bolded) from the native sequence (SEQ ID NO: 3061: EIGTGFPFDPHYVEVLG) were added to an E. coli lysate expressing HaloTag[22-297](M2F)-12×Gly/Ser-LgBiT. Reactions were incubated for 2 hours at room temperature. JF646 HaloTag ligand was added to the synthetic peptide/lysate mixtures, and the reaction was incubated for an additional 1.5 hours at room temperature prior to fluorescence detection.

[0061] FIG. 39. Effects of HaloTag[3-19] variants on enhancement of HaloTag[22-297](M2F)-12×Gly/Ser-LgBiT fluorescence across a range of synthetic peptide concentrations. Titrations of HaloTag[3-19] synthetic peptides containing mutations (bolded) from the native sequence (SEQ ID NO: 3061: EIGTGFPFDPHYVEVLG) were added to an E. coli lysate expressing HaloTag[22-297](M2F)-12×Gly/Ser-LgBiT. Reactions were incubated for 2 hours at room temperature. JF646 HaloTag ligand was added to the synthetic peptide/lysate mixtures, and the reaction was incubated for an additional 1.5 hours at room temperature prior to fluorescence detection.

[0062] FIG. 40. Effects of HaloTag[3-19] variants on fluorescence intensity of HaloTag[22-297](M2F)-12×Gly/Ser-LgBiT across a range of synthetic peptide concentrations. Titrations of HaloTag[3-19] synthetic peptides containing mutations (bolded) from the native sequence (SEQ ID NO: 3061: EIGTGFPFDPHYVEVLG) were added to an E. coli lysate expressing HaloTag[22-297](M2F)-12×Gly/Ser-LgBiT. Reactions were incubated for 2 hours at room temperature. JF646 HaloTag ligand was added to the synthetic peptide/lysate mixtures, and the reaction was incubated for an additional 1.5 hours at room temperature prior to fluorescence detection.

[0063] FIG. 41. Binding of HaloTag[22-297](M2F+F148M+V177E)-12×Gly/Ser-LgBiT-6×His to Biotin-HaloTag[3-19](12R)-4×Gly/Ser-VS-HiBiT synthetic peptide. Association and dissociation (right of the dotted line) of polypeptide reporter HaloTag[22-297](M2F+F148M+V177E)-12×Gly/Ser-LgBiT-6×His across a concentration range of 0.62-150 nM to biotin-HaloTag[3-19](12R)-4×Gly/Ser-VS-HiBiT synthetic peptide immobilized on streptavidin probes was measured using biolayer interferometry in PBST at 25° C.

[0064] FIG. 42. Yeast surface display of HaloTag[3-19]-4×Gly/Ser-VS-HiBiT. HaloTag[3-19]-4×Gly/Ser-VS-HiBiT was fused to yeast cell mating factor Aga2 for surface display. The resulting construct was transformed and expressed in S. cerevisiae. Cells were incubated with HaloTag[22-297](M2F)-12×Gly/Ser-LgBiT-6×His for 45 minutes at room temperature. Unbound HaloTag[22-297](M2F)-12×Gly/Ser-LgBiT-6×His was washed, and cells were incubated with JF549 HaloTag ligand for 45 minutes at room temperature. Unbound ligand was washed away from cells, and cells were incubated with anti-HA tag antibody from mouse for 30 minutes at room temperature. Excess primary antibody was washed away, and cells were incubated with the secondary antibody, goat anti-mouse IgG conjugated to AlexaFluor488, for 30 minutes at room temperature. Cells were washed and analyzed on a Sony Cell Sorter. The histograms represent 10,192 recorded events from a singlet cell positive gate. Cells in the AF488+ gate represent the population of cells that are positive for surface display of HaloTag[3-19]-4×Gly/Ser-VS-HiBiT (left histogram, 51.23%). Cells in the JF549+ gate represent the population of cells that are expressing HaloTag[3-19]-4×Gly/Ser-VS-HiBiT and are complemented with JF549 HaloTag ligand-bound HaloTag[22-297](M2F)-12×Gly/Ser-LgBiT-6×His (right histogram, 48.88%).

[0065] FIG. 43. Yeast surface display of EGFP-GGSG-HaloTag[3-19]-GGSG-VS-HiBiT. EGFP-GGSG-HaloTag[3-19]-GGSG-VS-HiBiT was fused to yeast cell mating factor Aga2 for surface display. The resulting construct was transformed and expressed in S. cerevisiae. Cells were incubated with HaloTag[22-297](M2F)-12×Gly/Ser-LgBiT-6×His for 45 minutes at room temperature. Unbound HaloTag[22-297](M2F)-12×Gly/Ser-LgBiT-6×His was washed, and cells were incubated with JF549 HaloTag ligand for 45 minutes at room temperature. Cells were washed and analyzed on a Sony Cell Sorter. The histograms represent 10,569 recorded events. Cells in the EGFP+ gate represent the population of cells that are positive for surface display of EGFP-GGSG-HaloTag[3-19]-GGSG-VS-HiBiT (left histogram, 48.07%). Cells in the JF549+ gate represent the population of cells that are complemented with JF549 HaloTag ligand-bound HaloTag[22-297](M2F)-12×Gly/Ser-LgBiT-6×His (right histogram, 46.41%).

[0066] FIG. 44. Yeast surface display of EGFP-GGSG-HaloTag[3-19]-GGSG-NVSGWRLFKKISN. The Aga2-EGFP-GGSG-HaloTag[3-19]-GGSG-VS-HiBiT surface display construct was altered so that the VS-HiBiT sequence was replaced by the sequence NVSGWRLFKKISN, which complements LgBiT with a lower affinity than HiBiT. The resulting construct was transformed and expressed in S. cerevisiae. Cells were incubated with HaloTag[22-297](M2F)-12×Gly/Ser-LgBiT-6×His for 45 minutes at room temperature. Unbound HaloTag[22-297](M2F)-12×Gly/Ser-LgBiT-6×His was washed, and cells were incubated with JF549 HaloTag ligand for 45 minutes at room temperature. Cells were washed and analyzed on a Sony Cell Sorter. The histograms represent 11,216 recorded events. Cells in the EGFP+ gate represent the population of cells that are positive for surface display of EGFP-GGSG-HaloTag[3-19]-NVSGWRLFKKISN (left histogram, 44.57%). Cells in the JF549+ gate represent the population of cells that are complemented with JF549 HaloTag ligand-bound HaloTag[22-297](M2F)-12×Gly/Ser-LgBiT-6×His (right histogram, 44.24%).

[0067] FIG. 45. Yeast surface display of EGFP-GGSG-HaloTag[3-19]-GGSG-NVTGYRLFKKISN. The Aga2-EGFP-GGSG-HaloTag[3-19]-GGSG-VS-HiBiT surface display construct was altered so that the VS-HiBiT sequence was replaced by the sequence NVTGYRLFKKISN, which complements LgBiT with a lower affinity than HiBiT. The resulting construct was transformed and expressed in S. cerevisiae. Cells were incubated with HaloTag[22-297](M2F)-12×Gly/Ser-LgBiT-6×His for 45 minutes at room temperature. Unbound HaloTag[22-297](M2F)-12×Gly/Ser-LgBiT-6×His was washed, and cells were incubated with JF549 HaloTag ligand for 45 minutes at room temperature. Cells were washed and analyzed on a Sony Cell Sorter. The histograms represent 11,203 recorded events. Cells in the EGFP+ gate represent the population of cells that are positive for surface display of EGFP-GGSG-HaloTag[3-19]-GGSG-NVTGYRLFKKISN (left histogram, 46.47%). Cells in the JF549+ gate represent the population of cells that are complemented with JF549 HaloTag ligand-bound HaloTag[22-297](M2F)-12×Gly/Ser-LgBiT-6×His (right histogram, 44.84%).

[0068] FIG. 46. Yeast surface display of EGFP-GGSG-HaloTag[3-19]-GGSG-VTGYRLFEKIS. The Aga2-EGFP-GGSG-HaloTag[3-19]-GGSG-VS-HiBiT surface display construct was altered so that the VS-HiBiT sequence was replaced by the sequence VTGYRLFEKIS, which complements LgBiT with a lower affinity than HiBiT. The resulting construct was transformed and expressed in S. cerevisiae. Cells were incubated with HaloTag[22-297](M2F)-12×Gly/Ser-LgBiT-6×His for 45 minutes at room temperature. Unbound HaloTag[22-297](M2F)-12×Gly/Ser-LgBiT-6×His was washed, and cells were incubated with JF549 HaloTag ligand for 45 minutes at room temperature. Cells were washed and analyzed on a Sony Cell Sorter. The histograms represent 11,230 recorded events. Cells in the EGFP+ gate represent the population of cells that are positive for surface display of EGFP-GGSG-HaloTag[3-19]-GGSG-VTGYRLFEKIS (left histogram, 49.51%). Cells in the JF549+ gate represent the population of cells that are complemented with JF549 HaloTag ligand-bound HaloTag[22-297](M2F)-12×Gly/Ser-LgBiT-6×His (right histogram, 6.96%).

[0069] FIG. 47. Complementation of HaloTag[22-297](M2F)-12×Gly/Ser-LgBiT variant in E. coli lysates using a genetic fusion of FKBP to HaloTag[3-19] peptide. HaloTag[22-297](M2F)-12×Gly/Ser-LgBiT or variant with M49F+D53G mutations was expressed in E. coli lysates and combined with lysates expressing FKBP fused to different tag sequences. Reactions were incubated at room temperature for 2 hours and then labeled with 50 nM JF646 HaloTag ligand prior to fluorescence detection. Data points represent independent cultures of each construct combined during the experiment, with error bars representing one standard deviation from the mean.

[0070] FIG. 48. Complementation and stabilization of HaloTag[22-297](M2F+D53S+D56P)-12×Gly/Ser-LgBiT in E. coli lysates using a synthetic HaloTag[3-19] peptide. HaloTag[22-297](M2F+D53S+D56P)-12×Gly/Ser-LgBiT was expressed in E. coli lysates and combined with excess synthetic HaloTag[3-19] peptide. Reactions were incubated for indicated time and temperatures and then labeled with 50 nM JF646 HaloTag ligand prior to fluorescence detection.

[0071] FIG. 49. Stability of HaloTag[22-297](M2F)-12×Gly/Ser-LgBiT in E. coli lysates after complementation with different synthetic peptides. HaloTag[22-297](M2F)-12×Gly/Ser-LgBiT was expressed in E. coli lysates and combined with 10 micromolar or more of the indicated synthetic peptides. Reactions were incubated at indicated temperature for 10 minutes and then labeled with 50 nM JF646 HaloTag ligand prior to fluorescence detection.

[0072] FIG. 50. Stability of HaloTag[22-297](M2F+D53G+V177E)-12×Gly/Ser-LgBiT in E. coli lysates after complementation with different synthetic peptides. HaloTag[22-297](M2F+D53G+V177E)-12×Gly/Ser-LgBiT was expressed in E. coli lysates and combined with 10 micromolar or more of the indicated synthetic peptides. Reactions were incubated at indicated temperature for 10 minutes and then labeled with 50 nM JF646 HaloTag ligand prior to fluorescence detection.

[0073] FIG. 51. Stability of HaloTag[22-297](M2F+M49F+S89A)-12×Gly/Ser-LgBiT in E. coli lysates after complementation with different synthetic peptides. HaloTag[22-297](M2F+M49F+S89A)-12×Gly/Ser-LgBiT was expressed in E. coli lysates and combined with 10 micromolar or more of the indicated synthetic peptides. Reactions were incubated at indicated temperature for 10 minutes and then labeled with 50 nM JF646 HaloTag ligand prior to fluorescence detection.

[0074] FIG. 52. Stability of HaloTag[22-297](M2F+M49F+L57I)-12×Gly/Ser-LgBiT in E. coli lysates after complementation with different synthetic peptides. HaloTag[22-297](M2F+M49F+L57I)-12×Gly/Ser-LgBiT was expressed in E. coli lysates and combined with 10 micromolar or more of the indicated synthetic peptides. Reactions were incubated at indicated temperature for 10 minutes and then labeled with 50 nM JF646 HaloTag ligand prior to fluorescence detection.

[0075] FIG. 53. Labeling kinetics of HaloTag[22-297](M2F+D53G+V177E)-12×Gly/Ser-LgBiT-3×Gly/Ser-6×His variant in E. coli lysates after complementation with synthetic peptide. HaloTag[22-297](M2F)-12×Gly/Ser-LgBiT-3×Gly/Ser-6×His or its variant with D53G+V177E mutations were expressed in E. coli lysates and combined with 200 micromolar HaloTag[3-19] synthetic peptide. Reactions were incubated at room temperature for 3 hours and then added to 10 nM TMR HaloTag ligand, reading continuously for fluorescence polarization of the ligand to monitor labeling. Lysate was added at the 3 minute timepoint of the graph to initially measure the baseline fluorescence polarization of the ligand and subsequent increase in binding upon lysate addition.

[0076] FIG. 54. Labeling kinetics of HaloTag[22-297](M2F+K140E)-12×Gly/Ser-LgBiT-3×Gly/Ser-6×His variant in E. coli lysates after complementation with synthetic peptide. HaloTag[22-297](M2F)-12×Gly/Ser-LgBiT-3×Gly/Ser-6×His or its variant with K140E mutation was expressed in E. coli lysates and combined with 200 micromolar HaloTag[3-19] synthetic peptide. Reactions were incubated at room temperature for 3 hours and then added to 10 nM TMR HaloTag ligand, reading continuously for fluorescence polarization of the ligand to monitor labeling. Lysate was added at the 3 minute timepoint of the graph to initially measure the baseline fluorescence polarization of the ligand and subsequent increase in binding upon lysate addition.

[0077] FIG. 55. Labeling kinetics of HaloTag[22-297](M2F+D53G+K140E)-12×Gly/Ser-LgBiT-3×Gly/Ser-6×His variant in E. coli lysates after complementation with synthetic peptide. HaloTag[22-297](M2F)-12×Gly/Ser-LgBiT-3×Gly/Ser-6×His or variants with K140E or D53G+K140E were expressed in E. coli lysates and combined with 200 micromolar HaloTag[3-19] synthetic peptide. Reactions were incubated at room temperature for 3 hours and then added to 10 nM TMR HaloTag ligand, reading continuously for fluorescence polarization of the ligand to monitor labeling. Lysate was added at the 3 minute timepoint of the graph to initially measure the baseline fluorescence polarization of the ligand and subsequent increase in binding upon lysate addition.

[0078] FIG. 56. Endpoint labeling activity of HaloTag[22-297](M2F+D53G)-12×Gly/Ser-LgBiT-3×Gly/Ser-6×His variants in E. coli lysates after complementation with synthetic peptide. HaloTag[22-297](M2F+D53G)-12×Gly/Ser-LgBiT-3×Gly/Ser-6×His variants were expressed in E. coli lysates and combined with 200 micromolar HaloTag[3-19] synthetic peptide. Reactions were incubated at room temperature for 3 hours and then combined with 100 nM JF646 HaloTag ligand. Fluorescence intensity was measured after 60 minute incubation with the ligand.

[0079] FIG. 57. Stability and labeling kinetics of purified HaloTag[22-297](M2F)-12×Gly/Ser-LgBiT-3×Gly/Ser-6×His after complementation with synthetic peptide. HaloTag[22-297](M2F)-12×Gly/Ser-LgBiT-3×Gly/Ser-6×His at 10 nM was combined with 125 micromolar HaloTag[3-19] synthetic peptide and incubated at 4 C or 32 C for 10 minutes. After preincubation with peptide at the indicated temperature, 2.5 nM TMR HaloTag ligand was injected into the reaction, and fluorescence polarization monitored over time to observe labeling kinetics.

[0080] FIG. 58. Stability and labeling kinetics of purified HaloTag[22-297](M2F+K140E)-12×Gly/Ser-LgBiT-3×Gly/Ser-6×His after complementation with synthetic peptide. HaloTag[22-297](M2F+K140E)-12×Gly/Ser-LgBiT-3×Gly/Ser-6×His at 10 nM was combined with 125 micromolar HaloTag[3-19] synthetic peptide and incubated at 4° C. or 32° C. for 10 minutes. After preincubation with peptide at the indicated temperature, 2.5 nM TMR HaloTag® ligand was injected into the reaction, and fluorescence polarization monitored over time to observe labeling kinetics.

[0081] FIG. 59. Stability and labeling kinetics of purified HaloTag[22-297](M2F+D53G+K140E)-12×Gly/Ser-LgBiT-3×Gly/Ser-6×His after complementation with synthetic peptide. HaloTag[22-297](M2F+D53G+K140E)-12×Gly/Ser-LgBiT-3×Gly/Ser-6×His at 10 nM was combined with 125 micromolar HaloTag[3-19] synthetic peptide and incubated at 4° C. or 32° C. for 10 minutes. After preincubation with peptide at the indicated temperature, 2.5 nM TMR HaloTag® ligand was injected into the reaction, and fluorescence polarization monitored over time to observe labeling kinetics.

[0082] FIG. 60. Stability and labeling kinetics of purified HaloTag[22-297](M2F+M49F+D53S+V177E)-12×Gly/Ser-LgBiT-3×Gly/Ser-6×His after complementation with synthetic peptide. HaloTag[22-297](M2F+D53S+V177E)-12×Gly/Ser-LgBiT-3×Gly/Ser-6×His at 10 nM was combined with 125 micromolar HaloTag[3-19] synthetic peptide and incubated at 4° C. or 37° C. for 10 minutes. After preincubation with peptide at the indicated temperature, 2.5 nM TMR HaloTag ligand was injected into the reaction, and fluorescence polarization monitored over time to observe labeling kinetics.

[0083] FIG. 61. Stability and labeling kinetics of purified HaloTag[22-297](M2F+D53G+K140E)-12×Gly/Ser-LgBiT-3×Gly/Ser-6×His after complementation with synthetic peptide. HaloTag[22-297](M2F+D53G+K140E)-12×Gly/Ser-LgBiT-3×Gly/Ser-6×His at 10 nM was combined with 125 micromolar HaloTag[3-19] synthetic peptide and incubated at 4° C. or 32° C. for 10 minutes. After preincubation with peptide at the indicated temperature, 2.5 nM TMR HaloTag ligand was injected into the reaction, and fluorescence polarization monitored over time to observe labeling kinetics.

[0084] FIG. 62. Fluorescent Intensity of HaloTag[22-297](M2F)-12×Gly/Ser-LgBiT Variants co-expressing FKBP-HaloTag[3-19]-5×Gly/Ser-VS-HiBiT in Live Mammalian Cells. HeLa cells were transiently transfected with separate plasmids expressing the indicated HaloTag[22-297](M2F)-12×Gly/Ser-LgBiT variant and HaloTag[3-19]-5×Gly/Ser-VS-HiBiT fragment fused to FKBP. Approximately 48 hours post-transfection, the cells were then labeled with 100 nM JF646 HaloTag ligand prior to fluorescence detection at indicated time points. This figure illustrates the fluorescence intensity of JF646 HaloTag ligand in live cell assays over time, comparing the fluorescent activity of cells expressing both HaloTag[3-19]-5×Gly/Ser-VS-HiBiT and HaloTag[22-297](M2F)-12×Gly/Ser-LgBiT variants with cells expressing only HaloTag[22-297](M2F)-12×Gly/Ser-LgBiT. HT-7 refers to full-length HaloTag. A non-transfected cell (NTC) control is included for reference. Three technical replicates were measured for each sample. The error bars represent the standard deviation of the mean (SD) of the data.

[0085] FIG. 63. Fluorescent Intensity of HaloTag[22-297](M2F)-12×Gly/Ser-LgBiT Variants co-expressing FKBP-HaloTag[3-19]-5×Gly/Ser-VS-HiBiT in Live Mammalian Cells. HeLa cells were transiently transfected with separate plasmids expressing HaloTag[22-297](M2F)-12×Gly/Ser-LgBiT variants and HaloTag[3-19]-5×Gly/Ser-VS-HiBiT fragment fused to FKBP. Approximately 48 hours post-transfection, the cells were then labeled with 100 nM JF646 HaloTag ligand prior to fluorescence detection at indicated time points. This figure illustrates the fluorescence intensity of JF646 HaloTag ligand in live cell assays over time, comparing the fluorescent activity of cells expressing both HaloTag[3-19]-5×Gly/Ser-VS-HiBiT and HaloTag[22-297](M2F)-12×Gly/Ser-LgBiT variants with cells expressing only HaloTag[22-297](M2F)-12×Gly/Ser-LgBiT. HT-7 refers to full-length HaloTag. A non-transfected cell (NTC) control is included for reference. Three technical replicates were measured for each sample. The error bars represent the standard deviation of the mean (SD) of the data.

[0086] FIG. 64. Fold Response Comparison of HaloTag[22-297](M2F)-12×Gly/Ser-LgBiT Variants co-expressing FKBP-HaloTag[3-19]-5×Gly/Ser-VS-HiBiT in Live Mammalian Cells. HeLa cells were transiently transfected with separate plasmids expressing HaloTag[22-297](M2F)-12×Gly/Ser-LgBiT variants and HaloTag[3-19]-5×Gly/Ser-VS-HiBiT fragment fused to FKBP. Approximately 48 hours post-transfection, the cells were labeled with 100 nM JF646 HaloTag ligand, and fluorescence was detected at indicated time points. The fold response of each assay condition was calculated as the ratio of fluorescence signal for cells expressing both the HaloTag[3-19]-5×Gly/Ser-VS-HiBiT and HaloTag[22-297](M2F)-12×Gly/Ser-LgBiT variants to cells expressing only the HaloTag[22-297](M2F)-12×Gly/Ser-LgBiT variant. HT-7 refers to full-length HaloTag. A non-transfected cell (NTC) control is included for reference. The error bars represent the standard deviation of the mean (SD) of the data.

[0087] FIG. 65. Comparison of Fluorescence Intensity and Fluorescence Fold Response of HaloTag[22-297](M2F)-12×Gly/Ser-LgBiT Variants. HeLa cells were transiently transfected with separate plasmids expressing HaloTag[22-297](M2F)-12×Gly/Ser-LgBiT variants and HaloTag[3-19]-5×Gly/Ser-VS-HiBiT fused to FKBP. After approximately 48 hours, post-transfection, the cells were labeled with 100 nM JF646 HaloTag ligand. Fluorescence was detected after 5 hours of incubation with JF646 ligand. The fold response was calculated as the ratio of fluorescence signal for cells expressing both the FKBP-HaloTag[3-19]-5×Gly/Ser-VS-HiBiT and HaloTag[22-297](M2F)-12×Gly/Ser-LgBiT variant to cells expressing only the HaloTag[22-297](M2F)-12×Gly/Ser-LgBiT variant. The M2F in this graph represents the template HaloTag[22-297](M2F)-12×Gly/Ser-LgBiT construct. All double mutants are added to the template, but only the two added mutations are shown for each construct. A non-transfected cell (NTC) control is included as a reference. This plot demonstrates the comparison of fold responses versus the total fluorescence of each mutant, highlighting the improved performance of HaloTag[22-297](M2F)-12×Gly/Ser-LgBiT variants in the presence of co-expressed FKBP-HaloTag[3-19]-5×Gly/Ser-VS-HiBiT.

[0088] FIG. 66. Fluorescence Intensity of HaloTag[22-297](M2F)-12×Gly/Ser-LgBiT Variants in Live Cell Fluorescent Plate Assays. HeLa cells were transiently transfected with separate plasmids expressing HaloTag[22-297](M2F)-12×Gly/Ser-LgBiT variants and HaloTag[3-19]-5×Gly/Ser-VS-HiBiT fused to FKBP. Approximately 48 hours post-transfection, the cells were labeled with 100 nM JF646 HaloTag ligand. Fluorescence intensity was detected after 5 hours of incubation with the JF646 HaloTag ligand. This figure illustrates the fluorescence intensity of JF646 HaloTag ligand in live cell assays, comparing the fluorescent activity of cells expressing both HaloTag[3-19]-5×Gly/Ser-VS-HiBiT and HaloTag[22-297](M2F)-12×Gly/Ser-LgBiT variants with cells expressing only the HaloTag[22-297](M2F)-12×Gly/Ser-LgBiT variants. Three technical replicates were measured for each sample. The error bars represent the standard deviation of the mean (SD) of the data.

[0089] FIG. 67. Fluorescent Fold Response of HaloTag[22-297](M2F)-12×Gly/Ser-LgBiT Variants in Live Cell Fluorescent Plate Assays. HeLa cells were transiently transfected with separate plasmids expressing HaloTag[22-297](M2F)-12×Gly/Ser-LgBiT variants and HaloTag[3-19]-5×Gly/Ser-VS-HiBiT fragment fused to FKBP. Approximately 48 hours post-transfection, the cells were labeled with 100 nM JF646 HaloTag® ligand. Fluorescence activity was detected after 5 hours of incubation with the JF646 ligand. The fold response of each assay condition was calculated as the ratio of fluorescence signal for cells expressing both the HaloTag[3-19]-5×Gly/Ser-VS-HiBiT and HaloTag[22-297](M2F)-12×Gly/Ser-LgBiT variants to cells expressing only the HaloTag[22-297](M2F)-12×Gly/Ser-LgBiT variants, and then normalized to the fold response of the template HaloTag[22-297](M2F)-12×Gly/Ser-LgBiT. The error bars represent the standard deviation of the mean (SD) of the data.

[0090] FIG. 68. Luminescence Activity of HaloTag[22-297](M2F)-12×Gly/Ser-LgBiT Variants when co-expressed with FKBP-HaloTag[3-19]-5×Gly/Ser-VS-HiBiT in Live Cells. HeLa cells were transfected with separate plasmids expressing HaloTag[22-297](M2F)-12×Gly/Ser-LgBiT variants and HaloTag[3-19]-5×Gly/Ser-VS-HiBiT fragment fused to FKBP. After approximately 48 hours post-transfection, the cells were treated with luminescent live-cell substrate (Furimazine). A non-transfected cell (NTC) control shown was measured identically except without introduction of an expression plasmid. Three technical replicates were measured for each sample. The error bars represent the standard deviation of the mean (SD) of the data.

[0091] FIG. 69. Luminescence Activity of HaloTag[22-297](M2F)-12×Gly/Ser-LgBiT Variants when co-expressed with FKBP-HaloTag[3-19]-5×Gly/Ser-VS-HiBiT in Live Cells. HeLa cells were transfected with separate plasmids expressing HaloTag[22-297](M2F)-12×Gly/Ser-LgBiT variants fragment and HaloTag[3-19]-5×Gly/Ser-VS-HiBiT fused to FKBP. After approximately 48 hours post-transfection, the cells were treated with a luminescent live-cell substrate (Furimazine). Three technical replicates were measured for each sample. The error bars represent the standard deviation of the mean (SD) of the data.

[0092] FIG. 70. Expression of HaloTag[22-297](M2F)-12×Gly/Ser-LgBiT Variants. HeLa cells were transiently transfected with plasmids expressing HaloTag[22-297](M2F)-12×Gly/Ser-LgBiT variants. After approximately 48 hours post-transfection, luminescence signal intensity was measured following cell lysis by adding HiBiT peptide at a final concentration of 200 nM, along with the lytic luminescent substrate (Furimazine). To prevent signal saturation and enhance signal linearity, the initial cell samples were diluted 80× with Opti-MEM media. A non-transfected cell (NTC) control is included for reference. Three technical replicates were measured for each sample. The error bars represent the standard deviation of the mean (SD) of the data.

[0093] FIG. 71. Comparison of Fold Response and Expression of LgHT-LgBiT HaloTag[22-297](M2F)-12×Gly/Ser-LgBiT Variants. To measure the fold response, HeLa cells were transiently transfected with separate plasmids expressing the HaloTag[22-297](M2F)-12×Gly/Ser-LgBiT variants fragment and HaloTag[3-19]-5×Gly/Ser-VS-HiBiT fragment fused to FKBP. After approximately 48 hours post-transfection, the cells were labeled with 100 nM JF646 HaloTag® ligand. Fluorescence was detected after 5 hours of incubation with JF646 HaloTag® ligand. The fold response was calculated as the ratio of fluorescence signal for cells expressing both the FKBP-HaloTag[3-19]-5×Gly/Ser-VS-HiBiT and HaloTag[22-297](M2F)-12×Gly/Ser-LgBiT variants to cells expressing only the HaloTag[22-297](M2F)-12×Gly/Ser-LgBiT variants. The M2F in this graph represents the template HaloTag[22-297](M2F)-12×Gly/Ser-LgBiT construct. All double mutants are added to the template, but only the two added mutations are shown for each construct for brevity. A non-transfected cell (NTC) control is included as a reference.

[0094] FIG. 72. Expression of HaloTag[22-297](M2F)-12×Gly/Ser-LgBiT Variants. HeLa cells were transiently transfected with plasmids expressing HaloTag[22-297](M2F)-12×Gly/Ser-LgBiT variants. After approximately 48 hours post-transfection, luminescence signal intensity was measured following cell lysis by adding HiBiT peptide at a final concentration of 200 nM, along with the lytic luminescent substrate (Furimazine). To prevent signal saturation and enhance signal linearity, the initial cell samples were diluted 80× with Opti-MEM media. A non-transfected cell (NTC) control is included for reference. Three technical replicates were measured for each sample. The error bars represent the standard deviation of the mean (SD) of the data.

[0095] FIG. 73. Expression of HaloTag[22-297](M2F)-12×Gly/Ser-LgBiT Variants. HeLa cells were transiently transfected with plasmids expressing the HaloTag[22-297](M2F)-12×Gly/Ser-LgBiT variants fragment. After approximately 48 hours post-transfection, luminescence signal intensity was measured following cell lysis by adding HiBiT peptide at a final concentration of 200 nM, along with the lytic luminescent substrate (Furimazine). To prevent signal saturation and enhance signal linearity, the initial cell samples were diluted 80× with Opti-MEM media. Four technical replicates were measured for each sample. The error bars represent the standard deviation of the mean (SD) of the data.

[0096] FIG. 74. Expression Variability of HaloTag[22-297](M2F)-12×Gly/Ser-LgBiT Variants across Transfection Replicates. HeLa cells were transiently transfected with plasmids expressing the HaloTag[22-297](M2F)-12×Gly/Ser-LgBiT variants fragment. Luminescence signal intensity was measured approximately 48 hours post-transfection after cell lysis by adding HiBiT peptide at a final concentration of 200 nM, along with the lytic luminescent substrate (Furimazine). To prevent signal saturation and enhance signal linearity, the initial cell samples were diluted 80× with Opti-MEM media. Three technical replicates were measured for each sample. The error bars represent the standard deviation of the mean (SD) of the data.

[0097] FIG. 75. Expression Variability of HaloTag[22-297](M2F)-12×Gly/Ser-LgBiT Variants across Transfection Replicates. HeLa cells were transiently transfected with the plasmid expressing HaloTag[22-297](M2F)-12×Gly/Ser-LgBiT. Luminescence signal intensity was measured approximately 48 hours post-transfection after cell lysis by adding HiBiT peptide at a final concentration of 200 nM, along with the lytic luminescent substrate (Furimazine). To prevent signal saturation and enhance signal linearity, the initial cell samples were diluted 80× with Opti-MEM media. Several technical replicates were measured for each transfection replicate. The error bars represent the standard deviation of the mean (SD) of the data. This graph demonstrates the observed variability of the lytic luminescence plate assays. The expression levels of the template across multiple transfection replicates enable the normalization of experimental results obtained from different replicates to the template.

[0098] FIG. 76A-B. Density Plots of Non-Transfected Cells in Cell Cytometry Assay for Filtering Dead Cells, Cell Debris, Doublets, and Cell Aggregates in Cell Cytometry Assay. Non-transfected HeLa cells were labeled with 100 nM JF646 HaloTag® ligand after approximately 48 hours post-seeding. Following a 1-hour incubation with the ligand, the cells were washed with DPBS media for 30 minutes (2× for 15 minutes each). Subsequently, the cells were lifted, and their fluorescence activity was measured using a live cell cytometry assay. The density plots of non-transfected cells were utilized in the cell cytometry assay to filter out dead cells, cell debris, doublets, and cell aggregates from the population of singlet, live HeLa cells. FIG. 76A. The Side Scatter Area (SSC-A) of non-transfected cells plotted against the Forward Scatter Area (FSC-A), which effectively filters out dead cells and cell debris. FIG. 76B. Density plot of the Forward Scatter Height (FSC—H) against the Forward Scatter Area (FSC-A) of non-transfected cells, which effectively filters out doublets and cell aggregates. The same gating strategies were applied to every single sample in the cell cytometry assay to effectively remove dead cells, cell debris, and doublets, ensuring accurate analysis of the singlet live HeLa cell population. In every cytometry experiment, listed in this document, the total number of events for the ungated population is 10,000-12,000 cells. The numbers on the graph indicate the percentage of cell populations within each depicted gate.

[0099] FIG. 77. Gating Strategy of Non-Transfected HeLa Cells for Detection of JF646 Positive Cells. Non-transfected HeLa cells were labeled with 100 nM JF646 HaloTag® ligand after approximately 48 hours post-seeding. Following a 1-hour incubation with the ligand, the cells were washed with DPBS media for 30 minutes (2× for 15 minutes each). Subsequently, the cells were lifted, and their fluorescence activity was measured using a live cell cytometry assay. The non-transfected sample was utilized for gating and measuring the activity of transfected cells in comparison to the non-transfected or non-fluorescently active cells. The histogram depicts the number of cells on the Y-axis against their activity with JF646 ligand on the X-axis. A consistent gating strategy, based on the baseline activity detected with non-transfected cells, was applied to every transfected sample to accurately detect their fluorescence activity. The initial number of events ranged from 10,000 to 12,000 cells. Specifically, for the analysis of JF646 activity, the number of events being analyzed is usually between 2,000 and 4,000. The cells being analyzed in the JF646+ gate is dependent on the transfection efficiency of the mutant and based on the gate settings for the JF646 activity.

[0100] FIG. 78. Fluorescent Intensity of HaloTag[22-297](M2F)-12×Gly/Ser-LgBiT Variants co-expressed with HaloTag[3-19]-5×Gly/Ser-VS-HiBiT in the JF646+ Gate Measured by Flow cytometry. HeLa cells were transiently transfected with separate plasmids expressing HaloTag[22-297](M2F)-12×Gly/Ser-LgBiT variants and HaloTag[3-19]-5×Gly/Ser-VS-HiBiT fragment fused to FKBP. After approximately 48 hours post-transfection, the cells were labeled with 100 nM JF646 HaloTag® ligand. Following a 1-hour incubation with the ligand, the cells were washed with DPBS media for 30 minutes (2× for 15 minutes each). Subsequently, the cells were lifted, and their fluorescence activity in the JF646+ gate was measured using the cell cytometry assay. Three technical replicates were measured for each sample. The error bars represent the standard deviation of the mean (SD) of the data.

[0101] FIG. 79. Fluorescence Fold Response Comparison of HaloTag[22-297](M2F)-12×Gly/Ser-LgBiT Variants co-expressing FKBP-HaloTag[3-19]-5×Gly/Ser-VS-HiBiT Using Flow Cytometry. HeLa cells were transiently transfected with separate plasmids expressing the HaloTag[22-297](M2F)-12×Gly/Ser-LgBiT variants fragment and HaloTag[3-19]-5×Gly/Ser-VS-HiBiT fragment fused to FKBP. After approximately 48 hours post-transfection, the cells were labeled with 100 nM JF646 HaloTag® ligand. Following a 1-hour incubation with the ligand, the cells were washed with DPBS media for 30 minutes (2× for 15 minutes each). Subsequently, the cells were lifted, and their fluorescence activity in the JF646+ gate was measured using the cell cytometry assay. The fold response of each assay condition was calculated as the ratio of mean fluorescence signal in the JF646+ gate for cells expressing both FKBP-HaloTag[3-19]-5×Gly/Ser-VS-HiBiT and HaloTag[22-297](M2F)-12×Gly/Ser-LgBiT variant to the mean fluorescence intensity of cells expressing only the HaloTag[22-297](M2F)-12×Gly/Ser-LgBiT variants in the same JF646+ gate. The error bars represent the standard deviation of the mean (SD) of the data.

[0102] FIG. 80. Comparison of Fluorescence Intensity and Fold Response of HaloTag[22-297](M2F)-12×Gly/Ser-LgBiT Variants Measured using Flow Cytometry. HeLa cells were transiently transfected with separate plasmids expressing HaloTag[22-297](M2F)-12×Gly/Ser-LgBiT variants and HaloTag[3-19]-5×Gly/Ser-VS-HiBiT fragment fused to FKBP. After approximately 48 hours post-transfection, the cells were labeled with 100 nM JF646 HaloTag® ligand. Following a 1-hour incubation with the ligand, the cells were washed with DPBS media for 30 minutes (2× for 15 minutes each). Subsequently, the cells were lifted, and their fluorescence activity in the JF646+ gate was measured using the cell cytometry assay. The fold response of each assay condition was calculated as the ratio of mean fluorescence signal in the JF646+ gate for cells expressing both the FKBP-HaloTag[3-19]-5×Gly/Ser-VS-HiBiT and HaloTag[22-297](M2F)-12×Gly/Ser-LgBiT variants to the mean fluorescence signal of cells expressing only the HaloTag[22-297](M2F)-12×Gly/Ser-LgBiT variants in the same JF646+ gate. The M2F in this graph represents the template, HaloTag[22-297](M2F)-12×Gly/Ser-LgBiT. All double mutants are added to the template, but only the two added mutations are shown for each construct to fit the data. A non-transfected cell (NTC) control is included as a reference. This plot demonstrates the comparison of fold responses versus the total fluorescent activity of each mutant, highlighting the improved performance of HaloTag[22-297](M2F)-12×Gly/Ser-LgBiT variants when co-expressed with FKBP-HaloTag[3-19]-5×Gly/Ser-VS-HiBiT.

[0103] FIG. 81A-C. Fluorescence Intensity During Co-expression of FKBP-HaloTag[3-19]-5×Gly/Ser-VS-HiBiT and HaloTag[22-297](M2F)-12×Gly/Ser-LgBiT Variants Using Flow Cytometry. The histograms of variants representing higher fold response FIG. 81(A) and lower fold response FIG. 81(B) phenotypes demonstrate how mutations can change the performance of the template, HaloTag[22-297](M2F)-12×Gly/Ser-LgBiT, measured using flow cytometry. Cells expressing only HaloTag[22-297](M2F)-12×Gly/Ser-LgBiT Variants are shown in light grey and those also co-expressing FKBP-HaloTag[3-19]-5×Gly/Ser-VS-HiBiT are shown in dark grey. HeLa cells were transiently transfected with separate plasmids expressing HaloTag[22-297](M2F)-12×Gly/Ser-LgBiT variants and HaloTag[3-19]-5×Gly/Ser-VS-HiBiT fragment fused to FKBP. After approximately 48 hours post-transfection, the cells were labeled with 100 nM JF646 HaloTag® ligand. Following a 1-hour incubation with the ligand, the cells were washed with DPBS media for 30 minutes (2× for 15 minutes each). Subsequently, the cells were lifted, and their fluorescence activity was measured using the cell cytometry assay. The M2F in this graph represents the template, HaloTag[22-297](M2F)-12×Gly/Ser-LgBiT construct. All double mutants are added to the template, but only the two added mutations are shown for each construct to represent the data. “Normalized to mode” on the Y-axis scales the number of events values based on the most frequently occurring value, in this graph the number of events in the JF646 negative gate. This enables standardized comparisons and highlights relative differences between populations.

[0104] FIG. 82. Fluorescent Intensity of HaloTag[22-297](M2F)-12×Gly/Ser-LgBiT Variants Co-expressed with FKBP-HaloTag[3-19]-5×Gly/Ser-VS-HiBiT in the JF646+ Gate Measured by Flow Cytometry. HeLa cells were transiently transfected with separate plasmids expressing the HaloTag[22-297](M2F)-12×Gly/Ser-LgBiT variants fragment and HaloTag[3-19]-5×Gly/Ser-VS-HiBiT fragment fused to FKBP. After approximately 48 hours post-transfection, the cells were labeled with 100 nM JF646 HaloTag® ligand. Following a 1-hour incubation with the ligand, the cells were washed with DPBS media for 30 minutes (2× for 15 minutes each). Subsequently, the cells were lifted, and their fluorescence activity in the JF646+ gate was measured using flow cytometry. Three technical replicates were measured for each sample. The error bars represent the standard deviation of the mean (SD) of the data.

[0105] FIG. 83. Fluorescence Fold Response Comparison of HaloTag[22-297](M2F)-12×Gly/Ser-LgBiT Variants Co-expressed with FKBP-HaloTag[3-19]-5×Gly/Ser-VS-HiBiT in Live Mammalian Cells Measured Using Flow Cytometry. HeLa cells were transiently transfected with separate plasmids expressing the HaloTag[22-297](M2F)-12×Gly/Ser-LgBiT variants fragment and HaloTag[3-19]-5×Gly/Ser-VS-HiBiT fragment fused to FKBP. After approximately 48 hours post-transfection, the cells were labeled with 100 nM JF646 HaloTag® ligand. Following a 1-hour incubation with the ligand, the cells were washed with DPBS media for 30 minutes (2× for 15 minutes each). Subsequently, the cells were lifted, and their fluorescence activity in the JF646+ gate was measured using the cell cytometry assay. The fold response of each assay condition was calculated as the ratio of mean fluorescence signal in the JF646+ gate for cells expressing both the FKBP-HaloTag[3-19]-5×Gly/Ser-VS-HiBiT and HaloTag[22-297](M2F)-12×Gly/Ser-LgBiT variants to the mean fluorescence signal of cells expressing only the HaloTag[22-297](M2F)-12×Gly/Ser-LgBiT variants in the same JF646+ gate. The error bars represent the standard deviation of the mean (SD) of the data.

[0106] FIG. 84. Fluorescent Intensity of HaloTag[22-297](M2F)-12×Gly/Ser-LgBiT Variants Co-expressed with FKBP-HaloTag[3-19]-5×Gly/Ser-VS-HiBiT in the JF646+ Gate Measured using Flow Cytometry. HeLa cells were transiently transfected with separate plasmids expressing the HaloTag[22-297](M2F)-12×Gly/Ser-LgBiT variants fragment and HaloTag[3-19]-5×Gly/Ser-VS-HiBiT fragment fused to FKBP. After approximately 48 hours post-transfection, the cells were labeled with 100 nM JF646 HaloTag® ligand. Following a 1-hour incubation with the ligand, the cells were washed with DPBS media for 30 minutes (2× for 15 minutes each). Subsequently, the cells were lifted, and their fluorescence activity in the JF646+ gate was measured using the cell cytometry assay. Two technical replicates were measured for each sample. The error bars represent the standard deviation of the mean (SD) of the data.

[0107] FIG. 85. Fluorescence Fold Response Comparison of HaloTag[22-297](M2F)-12×Gly/Ser-LgBiT Variants Co-expressed with FKBP-HaloTag[3-19]-5×Gly/Ser-VS-HiBiT in Live Mammalian Cells Measured Using Flow Cytometry. HeLa cells were transiently transfected with separate plasmids expressing the HaloTag[22-297](M2F)-12×Gly/Ser-LgBiT variants fragment and HaloTag[3-19]-5×Gly/Ser-VS-HiBiT fragment fused to FKBP. After approximately 48 hours post-transfection, the cells were labeled with 100 nM JF646 HaloTag® ligand. Following a 1-hour incubation with the ligand, the cells were washed with DPBS media for 30 minutes (2× for 15 minutes each). Subsequently, the cells were lifted, and their fluorescence activity in the JF646+ gate was measured using the cell cytometry assay. The fold response of each assay condition was calculated as the ratio of mean fluorescence signal in the JF646+ gate for cells expressing both the HaloTag[3-19]-5×Gly/Ser-VS-HiBiT and FKBP-HaloTag[22-297](M2F)-12×Gly/Ser-LgBiT variants to the mean fluorescence signal of cells expressing only the HaloTag[22-297](M2F)-12×Gly/Ser-LgBiT variants in the same JF646+ gate. The error bars represent the standard deviation of the mean (SD) of the data.

[0108] FIG. 86. Fluorescent Intensity of HaloTag[22-297](M2F)-12×Gly/Ser-LgBiT Variants Co-expressed with FKBP-HaloTag[3-19]-5×Gly/Ser-VS-HiBiT in the JF646+ Gate upon Prolonged Washing Period Measured by Flow Cytometry. HeLa cells were transiently transfected with separate plasmids expressing the HaloTag[22-297](M2F)-12×Gly/Ser-LgBiT variants fragment and HaloTag[3-19]-5×Gly/Ser-VS-HiBiT fragment fused to FKBP. Approximately 48 hours post-transfection, the cells were labeled with 100 nM JF646 HaloTag® ligand. Following a 1-hour incubation with the ligand, the cells were washed with DPBS media for 2 hours and a half (2× for 75 minutes each). Subsequently, the cells were lifted, and their fluorescence activity in the JF646+ gate was measured using flow cytometry. Two technical replicates were measured for each sample. The error bars represent the standard deviation of the mean (SD) of the data.

[0109] FIG. 87. Fluorescence Fold Response Comparison of HaloTag[22-297](M2F)-12×Gly/Ser-LgBiT Variants Co-expressed with FKBP-HaloTag[3-19]-5×Gly/Ser-VS-HiBiT upon Prolonged Washing Period in Live Mammalian Cells Measured Using Flow Cytometry. HeLa cells were transiently transfected with separate plasmids expressing HaloTag[22-297](M2F)-12×Gly/Ser-LgBiT variants and HaloTag[3-19]-5×Gly/Ser-VS-HiBiT fragment fused to FKBP. After approximately 48 hours post-transfection, the cells were labeled with 100 nM JF646 HaloTag® ligand. Following a 1-hour incubation with the ligand, the cells were washed with DPBS media for 2 hours and a half (2× for 75 minutes each). Subsequently, the cells were lifted, and their fluorescence activity in the JF646+ gate was measured using the cell cytometry assay. The fold response of each assay condition was calculated as the ratio of mean fluorescence signal in the JF646+ gate for cells expressing both the HaloTag[3-19]-5×Gly/Ser-VS-HiBiT and HaloTag[22-297](M2F)-12×Gly/Ser-LgBiT variants to the mean fluorescence signal of cells expressing only the HaloTag[22-297](M2F)-12×Gly/Ser-LgBiT variants in the same JF646+ gate. The error bars represent the standard deviation of the mean (SD) of the data.

[0110] FIG. 88. Fluorescent Activity of HaloTag[22-297](M2F)-12×Gly/Ser-LgBiT Variants Co-expressed with FKBP-HaloTag[3-19]-5×Gly/Ser-VS-HiBiT in the JF646+ Gate Measured by Flow Cytometry. HeLa cells were transiently transfected with separate plasmids expressing HaloTag[22-297](M2F)-12×Gly/Ser-LgBiT variants and HaloTag[3-19]-5×Gly/Ser-VS-HiBiT fragment fused to FKBP. Approximately 48 hours post-transfection, the cells were labeled with 100 nM JF646 HaloTag® ligand. Following a 1-hour incubation with the ligand, the cells were washed with DPBS media for 30 minutes (2× for 15 minutes each). Subsequently, the cells were lifted, and their fluorescence activity in the JF646+ gate was measured using the cell cytometry assay. The live cell cytometry assay revealed a relatively consistent level of fluorescent activity, normalized to the template, HaloTag[22-297](M2F)-12×Gly/Ser-LgBiT, between the first and second transfection replicates for the complemented FKBP-HaloTag[3-19]-5×Gly/Ser-VS-HiBiT and HaloTag[22-297](M2F)-12×Gly/Ser-LgBiT variants.

[0111] FIG. 89. Fluorescence Fold Response of HaloTag[22-297](M2F)-12×Gly/Ser-LgBiT Variants Co-expressed with FKBP-HaloTag[3-19]-5×Gly/Ser-VS-HiBiT in Live Mammalian Cells Measured Using Flow Cytometry. HeLa cells were transiently transfected with separate plasmids expressing HaloTag[22-297](M2F)-12×Gly/Ser-LgBiT variants and HaloTag[3-19]-5×Gly/Ser-VS-HiBiT fragment fused to FKBP. After approximately 48 hours post-transfection, the cells were labeled with 100 nM JF646 HaloTag® ligand. Following a 1-hour incubation with the ligand, the cells were washed with DPBS media for 1 hour (2× for 15 minutes each). Subsequently, the cells were lifted, and their fluorescence activity in the JF646+ gate was measured using the cell cytometry assay. The fold response of each assay condition was calculated as the ratio of mean fluorescence signal in the JF646+ gate for cells expressing both the FKBP-HaloTag[3-19]-5×Gly/Ser-VS-HiBiT and HaloTag[22-297](M2F)-12×Gly/Ser-LgBiT variants to the mean fluorescence signal of cells expressing only the HaloTag[22-297](M2F)-12×Gly/Ser-LgBiT variants in the same JF646+ gate. Flow cytometry revealed a relatively consistent level of fluorescent fold response, normalized to the template, HaloTag[22-297](M2F)-12×Gly/Ser-LgBiT construct, between the first and second transfection replicates.

[0112] FIG. 90. Variability of Fluorescent Activity of HaloTag[22-297](M2F)-12×Gly/Ser-LgBiT Variants Co-expressed with FKBP-HaloTag[3-19]-5×Gly/Ser-VS-HiBiT in the JF646+ Gate Measured by Flow Cytometry across Transfection Replicates. HeLa cells were transiently transfected with separate plasmids expressing HaloTag[22-297](M2F)-12×Gly/Ser-LgBiT and HaloTag[3-19]-5×Gly/Ser-VS-HiBiT fragment fused to FKBP. Approximately 48 hours post-transfection, the cells were labeled with 100 nM JF646 HaloTag® ligand. Following a 1-hour incubation with the ligand, the cells were washed with DPBS media for 30 minutes (2× for 15 minutes each). Subsequently, the cells were lifted, and their fluorescence activity in the JF646+ gate was measured using flow cytometry. The expression levels of the template across multiple transfection replicates enable the normalization of experimental results obtained from different replicates to the template.

[0113] FIG. 91. Comparison of Fluorescence Intensity and Fold Response of HaloTag[22-297](M2F)-12×Gly/Ser-LgBiT Variants Co-expressed with FKBP-HaloTag[3-19]-5×Gly/Ser-VS-HiBiT Using Flow Cytometry. HeLa cells were transiently transfected with separate plasmids expressing HaloTag[22-297](M2F)-12×Gly/Ser-LgBiT variants and HaloTag[3-19]-5×Gly/Ser-VS-HiBiT fragment fused to FKBP. Approximately 48 hours post-transfection, the cells were labeled with 100 nM JF646 HaloTag® ligand. Following a 1-hour incubation with the ligand, the cells were washed with DPBS media for 30 minutes (2× for 15 minutes each). Subsequently, the cells were lifted, and their fluorescence activity in the JF646+ gate was measured using flow cytometry. The fold response of each assay condition was calculated as the ratio of the mean fluorescence signal in the JF646+ gate for cells expressing both the FKBP-HaloTag[3-19]-5×Gly/Ser-VS-HiBiT and HaloTag[22-297](M2F)-12×Gly/Ser-LgBiT variants to the mean fluorescence signal of cells expressing only the HaloTag[22-297](M2F)-12×Gly/Ser-LgBiT variants in the same JF646+ gate. Four transfection replicates are depicted for the template, HaloTag[22-297](M2F)-12×Gly/Ser-LgBiT construct, shown in darker gray. All single and double mutants were added to the template, HaloTag[22-297](M2F)-12×Gly/Ser-LgBiT construct, but only the added mutations are shown for each construct. This plot highlights the comparison of fold responses versus the total fluorescent activity of each mutant, emphasizing the improved performance of HaloTag[22-297](M2F)-12×Gly/Ser-LgBiT variants mutations when Co-expressed with FKBP-HaloTag[3-19]-5×Gly/Ser-VS-HiBiT.

[0114] FIG. 92. Gating of Non-Transfected Cells in Flow Cytometry for Separating Single and Double Positive Cells of JF646 and EGFP Signal. Non-transfected HeLa cells were labeled with 100 nM JF646 HaloTag® ligand approximately 48 hours post-seeding. After a 1-hour incubation with the ligand, the cells were washed with DPBS media for 30 minutes (2× for 15 minutes each). Subsequently, the cells were lifted, and their fluorescence activity was measured using a live cell cytometry assay. The density plot of non-transfected cells was utilized to establish gating regions: JF646 negative (Q4) and JF646 positive (Q3), as well as negative EGFP expression (Q4) and positive EGFP expression (Q1). Consequently, double-negative cells were identified in Q4, single-positive cells for JF646 and EGFP were observed in Q3 and Q1, respectively. Double-positive cells were identified in Q2.

[0115] FIG. 93A-B. Comparison of Cells Expressing HaloTag[22-297](M2F)-12×Gly/Ser-LgBiT Co-expressing EGFP-HaloTag[3-19]-5×Gly/Ser-VS-HiBiT Using Flow Cytometry. HeLa cells were transiently transfected with separate plasmids expressing either FIG. 93(A) HaloTag[22-297](M2F)-12×Gly/Ser-LgBiT alone or FIG. 93(B) co-expressing HaloTag[22-297](M2F)-12×Gly/Ser-LgBiT and EGFP-HaloTag[3-19]-5×Gly/Ser-VS-HiBiT on separate plasmids. Approximately 48 hours post-transfection, the cells were labeled with 100 nM JF646 HaloTag® ligand. Following a 1-hour incubation with the ligand, the cells were washed with DPBS media for 30 minutes (2× for 15 minutes each). Subsequently, the cells were lifted, and their fluorescence activity was measured using flow cytometry. As depicted, As, a significant shift of cells is observed from the Q3 quadrant to the Q2 quadrant when both EGFP-HaloTag[3-19]-5×Gly/Ser-VS-HiBiT and HaloTag22-297-12×Gly/Ser-LgBiT variants are expressed, compared to when only the HaloTag22-297-12×Gly/Ser-LgBiT is expressed. This shift indicates the formation of a complex between the HaloTag[3-19]-5×Gly/Ser-VS-HiBiT and HaloTag22-297-12×Gly/Ser-LgBiT variants, or the co-expression of both EGFP-HaloTag[3-19]-5×Gly/Ser-VS-HiBiT and HaloTag22-297-12×Gly/Ser-LgBiT components in cells.

[0116] FIG. 94. Fluorescent Intensity of HaloTag[22-297](M2F)-12×Gly/Ser-LgBiT Variants Co-Expressed with EGFP-HaloTag[3-19]-5×Gly/Ser-VS-HiBiT Measured Using Flow Cytometry. HeLa cells were transiently transfected with separate plasmids expressing HaloTag[22-297](M2F)-12×Gly/Ser-LgBiT variants and HaloTag[3-19]-5×Gly/Ser-VS-HiBiT fragment fused to EGFP. Approximately 48 hours post-transfection, the cells were labeled with 100 nM JF646 HaloTag® ligand. Following a 1-hour incubation with the ligand, the cells were washed with DPBS media for 30 minutes (2× for 15 minutes each). Subsequently, the cells were lifted, and their fluorescence activity was measured using flow cytometry. The fluorescent intensity was determined based on the mean intensity in the second (double positive) quadrant, while the fluorescent intensity of the HaloTag[22-297](M2F)-12×Gly/Ser-LgBiT variant alone samples were measured based on the mean fluorescent intensity in the third (JF646+) quadrant. Two technical replicates were performed for each sample. The error bars represent the standard deviation of the mean (SD) of the data.

[0117] FIG. 95. Fluorescence Fold Response Comparison of HaloTag[22-297](M2F)-12×Gly/Ser-LgBiT Variants Co-expressed with EGFP-HaloTag[3-19]-5×Gly/Ser-VS-HiBiT in Live Mammalian Cells Measured Using Flow Cytometry with JF646 HaloTag ligand. HeLa cells were transiently transfected with separate plasmids expressing the HaloTag[22-297](M2F)-12×Gly/Ser-LgBiT variants and HaloTag[3-19]-5×Gly/Ser-VS-HiBiT fragment fused to EGFP. Approximately 48 hours post-transfection, the cells were labeled with 100 nM JF646 HaloTag® ligand. Following a 1-hour incubation with the ligand, the cells were washed with DPBS media for 30 minutes (2× for 15 minutes each). Subsequently, the cells were lifted, and their fluorescence activity was measured using flow cytometry. The fluorescent activity in the co-expression samples was determined based on the mean intensity in the second (double positive) quadrant, while the fluorescent activity of HaloTag[22-297](M2F)-12×Gly/Ser-LgBiT alone variants were measured based on the mean fluorescent intensity in the third (JF646+) quadrant. The fold response of each assay condition was calculated as the ratio of mean fluorescence signal in the second quadrant (double positive) by the mean fluorescence signal in the third (JF646+) quadrant.

[0118] FIG. 96. Fluorescence Fold Response Comparison of HaloTag[22-297](M2F)-12×Gly/Ser-LgBiT Variants Co-Expressed with EGFP-HaloTag[3-19]-5×Gly/Ser-VS-HiBiT in Live Mammalian Cells Measured Using Flow Cytometry with JF635 HaloTag Ligand. HeLa cells were transiently transfected with separate plasmids expressing the HaloTag[22-297](M2F)-12×Gly/Ser-LgBiT variants fragment and HaloTag[3-19]-5×Gly/Ser-VS-HiBiT fragment fused to EGFP. Approximately 48 hours post-transfection, the cells were labeled with 100 nM JF635 HaloTag® ligand. Following a 1-hour incubation with the ligand, the cells were washed with DPBS media for 30 minutes (2× for 15 minutes each). Subsequently, the cells were lifted, and their fluorescence activity was measured using flow cytometry. The fluorescent activity in the co-expression samples was determined based on the mean intensity in the second (double positive) quadrant, while the fluorescent activity of HaloTag[22-297](M2F)-12×Gly/Ser-LgBiT alone variants were measured based on the mean fluorescent intensity in the third (JF646+) quadrant. The fold response of each assay condition was calculated as the ratio of mean fluorescence signal in the second quadrant (double positive) by the mean fluorescence signal in the third (JF646+) quadrant. The results demonstrate that the fold responses are enhanced when using the more fluorogenic ligand, JF635, compared to the less fluorogenic ligand, JF646.

[0119] FIG. 97. Comparison of Fluorescence Intensity and Fold Response for Selected HaloTag[22-297](M2F)-12×Gly/Ser-LgBiT Variants Measured by Flow Cytometry. HeLa cells were transiently transfected with separate plasmids expressing HaloTag[22-297](M2F)-12×Gly/Ser-LgBiT variants and HaloTag[3-19]-5×Gly/Ser-VS-HiBiT fragment fused to EGFP. Approximately 48 hours post-transfection, the cells were labeled with 100 nM JF646 HaloTag® ligand. Following a 1-hour incubation with the ligand, the cells were washed with DPBS media for 30 minutes (2× for 15 minutes each). Subsequently, the cells were lifted, and their fluorescence activity in the JF646+ gate was measured using flow cytometry. The fold response of each assay condition was calculated as the ratio of the mean fluorescence signal in the JF646+ gate for cells expressing both the EGFP-HaloTag[3-19]-5×Gly/Ser-VS-HiBiT and HaloTag[22-297](M2F)-12×Gly/Ser-LgBiT variants to the mean fluorescence signal of cells expressing only the HaloTag[22-297](M2F)-12×Gly/Ser-LgBiT variants in the same JF646+ gate. Two transfection replicates are depicted for the template, HaloTag[22-297](M2F)-12×Gly/Ser-LgBiT, shown in dark gray. This plot emphasizes the improved fluorescence intensity of HaloTag[22-297](M2F)-12×Gly/Ser-LgBiT variants mutations when co-expressed with EGFP-HaloTag[3-19]-5×Gly/Ser-VS-HiBiT.

[0120] FIG. 98A-C. Fluorescence of HeLa cells Co-Expressing HaloTag[22-297](M2F)-12×Gly/Ser-LgBiT Variants with EGFP-HaloTag[3-19]-5×Gly/Ser-VS-HiBiT Using Confocal Imaging. HeLa cells were transiently transfected with separate plasmids expressing the HaloTag[22-297](M2F)-12×Gly/Ser-LgBiT variants and HaloTag[3-19]-5×Gly/Ser-VS-HiBiT fragment fused to EGFP. For comparison, cells were transfected HaloTag[22-297](M2F)-12×Gly/Ser-LgBiT variants alone. Approximately 48 hours post-transfection, the cells were labeled with 100 nM JF646 HaloTag® ligand. Following a 1-hour incubation, the cells were imaged using a confocal microscope in both the green channel (Ex. 488 nm) and the far-red channel (Ex. 640 nm). The laser and gain settings were optimized for each construct to minimize saturated pixels. Rows show the co-expressed and single plasmid control signals for FIG. 98(A) HaloTag[22-297](M2F)-12×Gly/Ser-LgBiT, FIG. 98(B) HaloTag[22-297](M2F+D53G+F148M)-12×Gly/Ser-LgBiT and FIG. 98(C) HaloTag[22-297](M2F+D53G+V177E)-12×Gly/Ser-LgBiT.

[0121] FIG. 99. Quantitated Fluorescence of HeLa cells Co-Expressing HaloTag[22-297](M2F)-12×Gly/Ser-LgBiT Variants with EGFP-HaloTag[3-19]-5×Gly/Ser-VS-HiBiT Using Confocal Imaging. HeLa cells were transiently transfected with separate plasmids expressing HaloTag[22-297](M2F)-12×Gly/Ser-LgBiT variants and HaloTag[3-19]-5×Gly/Ser-VS-HiBiT fused to EGFP. Additionally, cells were transfected with mutants of HaloTag[22-297](M2F)-12×Gly/Ser-LgBiT variants alone to measure signal from background labeling. Approximately 48 hours post-transfection, the cells were labeled with 100 nM JF646 HaloTag® ligand. Following a 1-hour incubation, the cells were imaged using a confocal microscope in both the green channel (Ex. 488 nm) and the far-red channel (Ex. 640 nm). The laser and gain settings were optimized for each construct to minimize saturated pixels. To quantify the confocal images, multiple fields of view were collected for each sample, and the intensity of individual cells was measured for both the co-expression and background signal. The bar represents the mean of the data. Fold response indicated above samples was calculated as the ratio of the mean specific signal for cells expressing both the EGFP-HaloTag[3-19]-5×Gly/Ser-VS-HiBiT and HaloTag[22-297](M2F)-12×Gly/Ser-LgBiT variants to the mean intensity of the signal for cells expressing only the HaloTag[22-297](M2F)-12×Gly/Ser-LgBiT variants. This graph illustrates how mutating the template has improved the performance of HaloTag[22-297](M2F)-12×Gly/Ser-LgBiT variants when co-expressed with EGFP-HaloTag[3-19]-5×Gly/Ser-VS-HiBiT in confocal imaging applications.

[0122] FIG. 100. CRISPR Knock-In Efficiency at Endogenous PARP1 and CTNNB1 Loci in DLD-1 Cell Pools During Introduction of HaloTag[3-19]—VS-HiBiT Variants. The variants include HaloTag[3-19]—VS-HiBiT without linkers and HaloTag[3-19]—VS-HiBiT variants with 4×Gly/Ser linkers (GGSG-HaloTag[3-19]-GGSG VS-HiBiT). Data was collected using Droplet Digital Polymerase Chain Reaction. Knock-in efficiency was calculated as the percentage of PCR amplicon copies per volume containing the tagged sequence versus non-tagged sequence at the target loci. The error bars represent the standard deviation of the mean (SD) of the data.

[0123] FIG. 101. Expression of PARP1 and CTNNB1 Tagged with HaloTag[3-19]—VS-HiBiT Variants or HiBiT in CRISPR Pools. The luminescence signal intensity of DLD-1 CRISPR cell pools (40,000 cells per pool replicate) was measured following cell lysis by adding LgBiT protein along with the lytic luminescent substrate (Furimazine). Six technical replicates were tested for each construct's CRISPR pool. This result confirms the integration and functionality of each of the tags. Additionally, it demonstrates that the addition of a linker in the HaloTag[3-19]-GGSG-VS-HiBiT variant improved detection. To ensure that the luminescence activities were not affected by the knock-in efficiencies of the insert within the CRISPR pools, pools that exhibited relatively similar knock-in efficiencies were selected for this experiment. The error bars represent the standard deviation of the mean (SD) of the data.

[0124] FIG. 102. Endogenous Expression of PARP1 fused to HaloTag[3-19]—VS-HiBiT Variants or HiBiT in CRISPR clones. Luminescence signal intensity was measured for DLD-1 CRISPR cell clones (40,000 cells per clone for each replicate) following cell lysis by adding LgBiT protein and the lytic luminescent substrate (Furimazine). Several technical replicates were performed for each construct's CRISPR clone. The results confirm successful integration and functionality of each of the tags. Additionally, it demonstrates that the addition of a linker in the HaloTag[3-19]-GGSG-VS-HiBiT variant improved detection at the CRISPR clone level. The error bars represent the standard deviation of the mean (SD) of the data.

[0125] FIG. 103A-C. Gating Strategy of Non-Transfected PARP1-GGSG-HaloTag[3-19]-GGSG-VS-HiBiT DLD-1 Cells for JF646 Positive Cells. DLD-1 cell line expressing PARP1-GGSG-HaloTag[3-19]-GGSG-VS-HiBiT was labeled with 100 nM JF646 HaloTag® ligand after approximately 48 hours post-seeding. Following a 1-hour incubation with the ligand, the cells were washed with DPBS media for 30 minutes (2×15 minutes). Subsequently, the cells were detached, and their fluorescence intensity was measured using flow cytometry. The density plots of non-transfected cells were utilized in the cell cytometry assay to filter out dead cells, cell debris, doublets, and cell aggregates from the population of singlet DLD-1 cells. FIG. 103(A) Side Scatter Area (SSC-A) of non-transfected cells plotted against the Forward Scatter Area (FSC-A), which effectively filters out dead cells and cell debris. FIG. 103(B) Density plot of the Height of the Forward Scatter (FSC—H) against the Area of the Forward Scatter (FSC-A) of non-transfected cells, which effectively filters out doublets and cell aggregates. The same gating strategies were applied to every single sample in the cell cytometry assay to effectively remove dead cells, cell debris, and doublets, ensuring accurate analysis of the singlet live DLD-1 cell population. FIG. 103(C) The histogram represents the number of cells on the Y-axis and their intensity with JF646 ligand on the X-axis. A consistent gating strategy, established using the baseline activity detected with non-transfected cells, was applied to each transfected sample to accurately identify and quantify their fluorescence activity. Prior to this step, the gating strategy was consistent with previous cytometry experiments, excluding dead cells, cell debris, and cell aggregates. In every cytometry experiment, listed in this document, the total number of events for the ungated population is 10,000-12,000 cells. The numbers on the graph indicate the percentage of cell populations within each depicted gate. Specifically, for the analysis of JF646 activity, the number of events being analyzed is usually between 2,000 and 4,000. The cells being analyzed in the JF646+ gate depend on the transfection efficiency of the mutant and based on the gate settings for the JF646 activity.

[0126] FIG. 104. Comparison of Fluorescent Intensity of HaloTag[22-297](M2F)-12×Gly/Ser-LgBiT Transiently Expressed with Different Promoters in a PARP1-GGSG-HaloTag[3-19]-GGSG-VS-HiBiT DLD-1 cell line. DLD-1 cells expressing endogenous PARP1-GGSG-HaloTag[3-19]-GGSG-VS-HiBiT were transiently transfected plasmids expressing HaloTag[22-297](M2F)-12×Gly/Ser-LgBiT under control of a CMV or TK promoter. Approximately 48 hours post-transfection, the cells were labeled with 100 nM JF646 HaloTag® ligand. Following a 1-hour incubation, the cells were washed with DPBS media for 30 minutes (2×15 minutes each). Subsequently, the cells were detached, and their fluorescence activity was measured using flow cytometry. The gating strategy employed is consistent with previous cytometry experiments, excluding dead cells, cell debris, and cell aggregates. Additionally, labeled, and non-transfected CRISPR cells were used to discriminate JF646 positive and JF646 negative populations. The values for the x-axis corresponding to the amount of plasmid DNA expressing HaloTag[22-297](M2F)-12×Gly/Ser-LgBiT using for transient transfection in each well of a 96-well plate. The error bars represent the standard deviation of the mean (SD) of the data. This graph illustrates that under all plasmid DNA concentrations, the fluorescent signal intensity in the JF646 positive gate is approximately 10-fold higher when the HaloTag[22-297](M2F)-12×Gly/Ser-LgBiT variant is expressed under the CMV promoter compared to expression under the TK promoter.

[0127] FIG. 105. Comparison of Fold Response and Fluorescent Intensity of HaloTag[22-297](M2F)-12×Gly/Ser-LgBiT Transiently Expressed with Different Promoters in a PARP1-GGSG-HaloTag[3-19]-GGSG-VS-HiBiT DLD-1 cell line. DLD-1 cells expressing endogenous PARP1-GGSG-HaloTag[3-19]-GGSG-VS-HiBiT were transiently transfected plasmids expressing HaloTag[22-297](M2F)-12×Gly/Ser-LgBiT under control of a CMV or TK promoter. Approximately 48 hours post-transfection, the cells were labeled with 100 nM JF646 HaloTag® ligand. Following a 1-hour incubation, the cells were washed with DPBS media for 30 minutes (2× at 15 minutes each). Subsequently, the cells were detached, and their fluorescence activity was measured using flow cytometry. The fold response of each assay condition was calculated as the ratio of mean fluorescence signal in the JF646+ gate for PARP1-GGSG-HaloTag[3-19]-GGSG-VS-HiBiT DLD-1 cells transiently expressing HaloTag[22-297](M2F)-12×Gly/Ser-LgBiT to the mean fluorescence signal of parental DLD-1 cells transiently expressing HaloTag[22-297](M2F)-12×Gly/Ser-LgBiT in the same JF646+ gate. The values on the x-axis correspond to the amount of plasmid DNA expressing HaloTag[22-297](M2F)-12×Gly/Ser-LgBiT used to transiently transfect cells in each well of the 96-well plate. The error bars represent the standard deviation of the mean (SD) of the data. These results demonstrate that the fold response can be improved by adjusting the concentration of plasmid DNA expressing HaloTag22-297-12×Gly/Ser-LgBiT, particularly under a promoter that expresses a lower amount of HaloTag22-297-12×Gly/Ser-LgBiT such as a TK promoter.

[0128] FIG. 106A-C. Comparison of Promoter Influence on Percentage of Cells Labeled with HaloTag Ligand in Endogenous tagged PARP1-GGSG-HaloTag[3-19]-GGSG-VS-HiBiT DLD-1 Cells and Parental DLD-1 Cells Transiently Expressing HaloTag[22-297](M2F)-12×Gly/Ser-LgBiT. FIG. 106(A) and FIG. 106(B) Parental DLD-1 Cells and DLD-1 cells expressing endogenous PARP1-GGSG-HaloTag[3-19]-GGSG-VS-HiBiT were transiently transfected with different concentrations of plasmids expressing HaloTag[22-297](M2F)-12×Gly/Ser-LgBiT under control of a CMV (A) and TK (B) promoters. FIG. 106(C) DLD-1 cells expressing endogenous PARP1-GGSG-HaloTag[3-19]-GGSG-VS-HiBiT were transiently transfected with different concentrations of plasmids expressing HaloTag[22-297](M2F)-12×Gly/Ser-LgBiT under control of a CMV or TK promoter. Approximately 48 hours post-transfection, the cells were labeled with 100 nM JF646 HaloTag® ligand. Following a 1-hour incubation, the cells were washed with DPBS media for 30 minutes (2× at 15 minutes each). Subsequently, the cells were detached, and their fluorescence activity was measured using flow cytometry. The values on the x-axis correspond to the amount of plasmid DNA encoding HaloTag[22-297](M2F)-12×Gly/Ser-LgBiT used for transient transfection in each well of a 96-well plate. The error bars represent the standard deviation of the mean (SD) of the data. This graph illustrates that the percentage of DLD-1 cells overexpressing the HaloTag[22-297](M2F)-12×Gly/Ser-LgBiT variants under the CMV promoter in the JF646+ gate is generally higher than the corresponding percentage for CRISPR cells overexpressing the HaloTag[22-297](M2F)-12×Gly/Ser-LgBiT variant under the TK promoter.

[0129] FIG. 107. Fold Difference in the Percentage of Cells Labeled with HaloTag Ligand in Endogenous tagged PARP1-GGSG-HaloTag[3-19]-GGSG-VS-HiBiT DLD-1 Cells Transiently Expressing HaloTag[22-297](M2F)-12×Gly/Ser-LgBiT Under Different Promoters. DLD-1 cells expressing endogenous PARP1-GGSG-HaloTag[3-19]-GGSG-VS-HiBiT were transiently transfected plasmids expressing HaloTag[22-297](M2F)-12×Gly/Ser-LgBiT under control of a CMV or TK promoter. Approximately 48 hours post-transfection, the cells were labeled with 100 nM JF646 HaloTag® ligand. Following a 1-hour incubation, the cells were washed with DPBS media for 30 minutes (2× at 15 minutes each). Subsequently, the cells were detached, and their fluorescence activity was measured using flow cytometry. The fold response of each assay condition was calculated as the ratio of the frequency of the parent in the JF646+ gate for PARP1-GGSG-HaloTag[3-19]-GGSG-VS-HiBiT DLD-1 cells expressing HaloTag[22-297](M2F)-12×Gly/Ser-LgBiT to the frequency of the parent of parental DLD-1 cells transiently expressing HaloTag[22-297](M2F)-12×Gly/Ser-LgBiT in the same JF646+ gate. The values on the x-axis correspond to the amount of plasmid DNA encoding HaloTag[22-297](M2F)-12×Gly/Ser-LgBiT used for transient transfection in each well of a 96-well plate. The error bars represent the standard deviation of the mean (SD) of the data. This graph illustrates that although the overall fluorescent intensity with the TK promoter is approximately one log lower compared to the expression with the CMV promoter, resulting in a lower percentage of cells in the JF646+ gate (lower frequency of parent values), the fold difference of tagged CRISPR cells over parental cells in the JF646+ gate is higher with the TK promoter compared to the CMV promoter. The fold response is maximized around 10-40 ng/well of HaloTag [22-297](M2F)-12×Gly/Ser-LgBiT plasmid DNA concentration for expression with the TK promoter.

[0130] FIG. 108A-B. Comparison of Fluorescence Intensity between HaloTag[22-297](M2F)-12×Gly/Ser-LgBiT and HaloTag[22-297](M2F+K140E)-12×Gly/Ser-LgBiT in Flow Cytometry. FIG. 108(A) Overlaid histograms of PARP1-GGSG-HaloTag[3-19]-GGSG-VS-HiBiT DLD-1 cells transiently expressing either HaloTag[22-297](M2F)-12×Gly/Ser-LgBiT (light grey) or its variant HaloTag[22-297](M2F+K140E)-12×Gly/Ser-LgBiT (dark grey). “Normalized to mode” on the Y-axis scales the number of events values based on the most frequently occurring value, in this graph the number of events in the JF646 negative gate. This enables standardized comparisons and highlights relative differences between populations. FIG. 108(B) Mean fluorescent intensity of HaloTag[22-297](M2F)-12×Gly/Ser-LgBiT or its variant containing the K140E mutation in the JF646 positive gate in PARP1-GGSG-HaloTag[3-19]-GGSG-VS-HiBiT DLD-1 cells. Cells expressing endogenous PARP1-GGSG-HaloTag[3-19]-GGSG-VS-HiBiT were transiently transfected with HaloTag[22-297](M2F)-12×Gly/Ser-LgBiT or variant plasmids at 20 ng/well in a 96 well plate. Approximately 48 hours post-transfection, the cells were labeled with 100 nM JF646 HaloTag® ligand. Following a 1-hour incubation, the cells were washed with DPBS media for 30 minutes (2× at 15 minutes each). Subsequently, the cells were detached, and their fluorescence activity was measured using flow cytometry. Two technical replicates were tested for each construct. The gating strategy employed to exclude dead cells, cell debris, and cell aggregates is consistent with previous cytometry experiments. This graph illustrates that HaloTag[22-297](M2F)-12×Gly/Ser-LgBiT variant exhibits higher mean fluorescent intensity within the applied gating for JF646 activity. The error bars represent the standard deviation of the mean (SD) of the data.

[0131] FIG. 109A-B. Comparison of Fluorescence Fold Response in the JF646 Positive Gate between HaloTag[22-297](M2F)-12×Gly/Ser-LgBiT and HaloTag[22-297](M2F+K140E)-12×Gly/Ser-LgBiT Variants using Flow Cytometry. FIG. 109(A) Overlaid histograms of PARP1-GGSG-HaloTag[3-19]-GGSG-VS-HiBiT DLD-1 cells transiently expressing either HaloTag[22-297](M2F)-12×Gly/Ser-LgBiT (left) or its variant HaloTag[22-297](M2F+K140E)-12×Gly/Ser-LgBiT (right). For each variant histograms, the light grey histograms are for of CRIPSR cell transiently expressing the HaloTag[22-297](M2F)-12×Gly/Ser-LgBiT variants and darker grey histograms are for parental DLD-1 cells transiently expressing HaloTag[22-297](M2F)-12×Gly/Ser-LgBiT variants. “Normalized to mode” on the Y-axis scales the number of events values based on the most frequently occurring value, in this graph the number of events in the JF646 negative gate. This enables standardized comparisons and highlights relative differences between populations. FIG. 109(B) Fold Response of HaloTag[22-297](M2F+K140E)-12×Gly/Ser-LgBiT variants in the JF646 positive gate. Cells expressing endogenous PARP1-GGSG-HaloTag[3-19]-GGSG-VS-HiBiT were transiently transfected with HaloTag[22-297](M2F)-12×Gly/Ser-LgBiT or variant plasmids at 20 ng/well into wells of a 96-well plate. Approximately 48 hours post-transfection, the cells were labeled with 100 nM JF646 HaloTag® ligand. Following a 1-hour incubation, the cells were washed with DPBS media for 30 minutes (2× at 15 minutes each). Subsequently, the cells were detached, and their fluorescence activity was measured using flow cytometry. The fold response of each assay condition was calculated as the ratio of mean fluorescence signal in the JF646+ gate for PARP1-GGSG-HaloTag[3-19]-GGSG-VS-HiBiT DLD-1 cells transiently expressing HaloTag[22-297](M2F)-12×Gly/Ser-LgBiT to the mean fluorescence signal of parental DLD-1 cells expressing HaloTag[22-297](M2F)-12×Gly/Ser-LgBiT in the same JF646+ gate. The gating strategy employed to exclude dead cells, cell debris, and cell aggregates is consistent with previous cytometry experiments. The error bars represent the standard deviation of the mean (SD) of the data.

[0132] FIG. 110A-B. Influence of the K140E Mutation on Fold Difference of JF646 Positive Cells in Endogenous tagged PARP1-GGSG-HaloTag[3-19]-GGSG-VS-HiBiT DLD-1 Cells Transiently Expressing HaloTag[22-297](M2F)-12×Gly/Ser-LgBiT. DLD-1 cells expressing endogenous PARP1-GGSG-HaloTag[3-19]-GGSG-VS-HiBiT were transiently transfected plasmids expressing either FIG. 110(A) 20 ng/well or FIG. 110(B) 40 ng/well of HaloTag[22-297](M2F)-12×Gly/Ser-LgBiT or HaloTag[22-297](M2F+K140E)-12×Gly/Ser-LgBiT. Approximately 48 hours post-transfection, the cells were labeled with 100 nM JF646 HaloTag® ligand. Following a 1-hour incubation, the cells were washed with DPBS media for 30 minutes (2× at 15 minutes each). Subsequently, the cells were detached, and their fluorescence activity was measured using flow cytometry. The fold response of each assay condition was calculated as the ratio of frequency of parent in the JF646+ gate for PARP1-GGSG-HaloTag[3-19]-GGSG-VS-HiBiT DLD-1 cells expressing the HaloTag[22-297](M2F)-12×Gly/Ser-LgBiT variants to the frequency of parent of DLD-1 parental cells expressing the HaloTag[22-297](M2F)-12×Gly/Ser-LgBiT variants in the same JF646+ gate. The gating strategy employed to exclude dead cells, cell debris, and cell aggregates is consistent with previous cytometry experiments. Two technical replicates were tested for each construct. The error bars represent the standard deviation of the mean (SD) of the data. It also demonstrates that the frequency of parent and the fold response for the frequency of parent change with different amounts of plasmid DNA expressing HaloTag[22-297](M2F)-12×Gly/Ser-LgBiT being used to transfect cells.

[0133] FIG. 111. Comparison of Fluorescent Intensity of HaloTag[22-297](M2F)-12×Gly/Ser-LgBiT Transiently Expressed using mRNA in Parental and a PARP1-GGSG-HaloTag[3-19]-GGSG-VS-HiBiT DLD-1 cell lines. DLD-1 cells expressing endogenous PARP1-GGSG-HaloTag[3-19]-GGSG-VS-HiBiT were transfected with mRNA encoding HaloTag[22-297](M2F)-12×Gly/Ser-LgBiT. After approximately 24 hours post-transfection, the cells were labeled with 100 nM JF646 HaloTag® ligand. Following a 1-hour incubation, the cells underwent two 15-minute washes with DPBS media, totaling 30 minutes. Subsequently, the cells were detached, and their fluorescence activity was quantified using flow cytometry. The gating strategy employed for excluding dead cells, cell debris, and cell aggregates remained consistent with previous cytometry experiments. For each sample, the JF646 positive gate setting was optimized to maximize differentiation between tagged and untagged cells that varied for each mRNA concentration, in order to compare optimal performance at each mRNA concentration. The values on the x-axis correspond to the mRNA concentration used for transfection in each well of a 96-well plate. Two technical replicates were performed for each construct. The error bars represent the standard deviation of the mean (SD) of the data. The fluorescence intensity value for the no-mRNA control is zero in the JF646 positive gate.

[0134] FIG. 112. Fold Response Comparison of HaloTag[22-297](M2F)-12×Gly/Ser-LgBiT Transiently Expressed using mRNA in Parental and a PARP1-GGSG-HaloTag[3-19]-GGSG-VS-HiBiT DLD-1 cell lines. DLD-1 cells expressing endogenous PARP1-GGSG-HaloTag[3-19]-GGSG-VS-HiBiT were transfected with mRNA encoding HaloTag[22-297](M2F)-12×Gly/Ser-LgBiT. After approximately 24 hours post-transfection, the cells were labeled with 100 nM JF646 HaloTag® ligand. Following a 1-hour incubation, the cells underwent two 15-minute washes with DPBS media, totaling 30 minutes. Subsequently, the cells were detached, and their fluorescence activity was quantified using flow cytometry. The gating strategy employed for excluding dead cells, cell debris, and cell aggregates remained consistent with previous cytometry experiments. However, the gate setting to distinguish between JF646-positive and negative populations varied for each mRNA concentration. The setting was optimized to achieve maximum separation between the tagged cells and parental cells. The fold response of each assay condition was calculated as the ratio of mean fluorescence signal in the JF646+ gate for PARP1-GGSG-HaloTag[3-19]-GGSG-VS-HiBiT DLD-1 cells expressing HaloTag[22-297](M2F)-12×Gly/Ser-LgBiT to the mean fluorescence intensity of DLD-1 parental cells expressing HaloTag[22-297](M2F)-12×Gly/Ser-LgBiT in the same JF646+ gate. The values on the x-axis correspond to the mRNA concentration used for transfection in each well of a 96-well plate. This graph illustrates that the fold responses are higher at lower concentrations of HaloTag[22-297](M2F)-12×Gly/Ser-LgBiT variant mRNA. The error bars represent the standard deviation of the mean (SD) of the data. This observation suggests that at higher concentrations of HaloTag[22-297](M2F)-12×Gly/Ser-LgBiT variant mRNA, the abundance of HaloTag[22-297](M2F)-12×Gly/Ser-LgBiT variant exceeds the endogenously expressed PARP1-GGSG-HaloTag[3-19]-GGSG-VS-HiBiT, resulting in non-specific signal accumulation and reduced fold response.

[0135] FIG. 113A-B. Comparison of Fluorescence Intensity of HaloTag[22-297](M2F)-12×Gly/Ser-LgBiT transiently expressed using mRNA in PARP1-GGSG-HaloTag[3-19]-GGSG-VS-HiBiT DLD-1 Cells using Flow Cytometry. FIG. 113(A) Comparison of Fluorescence Intensity between DLD-1 cells expressing endogenous PARP1-GGSG-HaloTag[3-19]-GGSG-VS-HiBiT (Right) and Parental DLD-1 cells (Left) which were transiently transfected with varying concentrations of mRNA expressing HaloTag[22-297](M2F)-12×Gly/Ser-LgBiT. FIG. 113(B). PARP1-GGSG-HaloTag[3-19]-GGSG-VS-HiBiT DLD-1 cells (light grey) were transiently transfected with mRNA encoding HaloTag[22-297](M2F)-12×Gly/Ser-LgBiT (5 ng/well for a 96 well plate). As a control, the same mRNA was used to transfect parental DLD-1 cells (dark grey). After approximately 24 hours post-transfection, the cells were labeled with 100 nM JF646 HaloTag® ligand. Following a 1-hour incubation, the cells underwent two 15-minute washes with DPBS media, totaling 30 minutes. Subsequently, the cells were detached, and their fluorescence intensity was measured using flow cytometry. The gating strategy employed for excluding dead cells, cell debris, and cell aggregates remained consistent with previous cytometry experiments. The JF646 positive gate is shown for samples where 5 ng/well of mRNA was used for transfection. “Normalized to mode” on the Y-axis scales the number of events values based on the most frequently occurring value, in this graph the number of events in the JF646 negative gate. This enables standardized comparisons and highlights relative differences between populations.

[0136] FIG. 114. Fold Difference in the Percentage of Cells Labeled with HaloTag Ligand when transiently expressing HaloTag[22-297](M2F)-12×Gly/Ser-LgBiT using mRNA in PARP1-GGSG-HaloTag[3-19]-GGSG-VS-HiBiT DLD-1 Cells using Flow Cytometry. DLD-1 cells expressing endogenous PARP1-GGSG-HaloTag[3-19]-GGSG-VS-HiBiT were transfected with indicated amounts of mRNA encoding HaloTag[22-297](M2F)-12×Gly/Ser-LgBiT. After approximately 24 hours post-transfection, the cells were labeled with 100 nM HaloTag® ligands, JF646 and TMR. Following a 1-hour incubation, the cells underwent two 15-minute washes with DPBS media, totaling 30 minutes. Subsequently, the cells were detached, and their fluorescence activity was quantified using flow cytometry. The frequency of the parent for each assay condition was measured using the exact same gate setting for fluorescent intensity measurements. The fold response of each assay condition was calculated as the ratio of the frequency of the parent in the JF646+ gate for PARP1-GGSG-HaloTag[3-19]-GGSG-VS-HiBiT DLD-1 cells expressing HaloTag[22-297](M2F)-12×Gly/Ser-LgBiT to the frequency of the parent of parental DLD-1 cells expressing HaloTag[22-297](M2F)-12×Gly/Ser-LgBiT in the same JF646+ gate. The values on the x-axis correspond to the mRNA concentration used for transfection in each well of a 96-well plate. The error bars represent the standard deviation of the mean (SD) of the data.

[0137] FIG. 115. Comparison of Fluorescence Intensity of HaloTag[22-297](M2F)-12×Gly/Ser-LgBiT transiently expressed using plasmid DNA or mRNA in PARP1-GGSG-HaloTag[3-19]-GGSG-VS-HiBiT DLD-1 Cells using Flow Cytometry. DLD-1 cells expressing endogenous PARP1-GGSG-HaloTag[3-19]-GGSG-VS-HiBiT were transfected with 5 ng/well of either plasmid DNA (dark grey) or mRNA (light grey) encoding HaloTag[22-297](M2F)-12×Gly/Ser-LgBiT. After approximately 24 hours post-transfection, the cells were labeled with 100 nM JF646 HaloTag® ligand. Following a 1-hour incubation, the cells underwent two 15-minute washes with DPBS media, totaling 30 minutes. Subsequently, the cells were detached, and their fluorescence activity was measured using flow cytometry. The gating strategy employed for excluding dead cells, cell debris, and cell aggregates remained consistent with previous cytometry experiments. This graph demonstrates the impact of HaloTag[22-297](M2F)-12×Gly/Ser-LgBiT expression method on fluorescence intensity across the cell population. When expressed via mRNA, there is lower expression variability, leading to a more distinct peak for JF646 positive cells. In contrast, when comparing the same amount of plasmid DNA expression, a broad peak is observed, indicating a wider range of HaloTag[22-297](M2F)-12×Gly/Ser-LgBiT expression. “Normalized to mode” on the Y-axis scales the number of events values based on the most frequently occurring value, in this graph the number of events in the JF646 negative gate. This enables standardized comparisons and highlights relative differences between populations.

[0138] FIG. 116. Confocal Imaging of Live PARP1-HaloTag[3-19]-GGSG-VS-HiBiT DLD-1 Cells transiently transfected with HaloTag[22-297](M2F)-12×Gly/Ser-LgBiT plasmid DNA. DLD-1 cells expressing endogenous PARP1-GGSG-HaloTag[3-19]-GGSG-VS-HiBiT (top panels) or parental DLD-1 cells (bottom panels) were transfected with plasmid DNA encoding HaloTag[22-297](M2F)-12×Gly/Ser-LgBiT. Approximately 48 hours post-transfection, the cells were labeled with 100 nM JF646 HaloTag® ligand. Following a 1-hour incubation, the cells were imaged using a confocal microscope in the blue channel (Ex. 405 nm), the far-red channel (Ex. 640 nm), along with DIC (Differential interference contrast). The laser and gain settings were optimized to minimize saturated pixels in each channel. The PARP1 protein naturally localizes in the cell nucleus, and the images of the PARP1-HaloTag[3-19]-GGSG-VS-HiBiT DLD-1 cells show the localization of the far-red signal in the nucleus, along with a clear colocalization of DAPI and JF646. These images provide evidence that tagging the endogenous target, PARP1, with GGSG-HaloTag[3-19]-GGSG-VS-HiBiT will not affect the tagged protein localization to the nucleus.

[0139] FIG. 117. Quantification of Confocal Imaging of Live PARP1-HaloTag[3-19]-GGSG-VS-HiBiT DLD-1 Cells transiently transfected with HaloTag[22-297](M2F)-12×Gly/Ser-LgBiT plasmid DNA. DLD-1 cells expressing endogenous PARP1-GGSG-HaloTag[3-19]-GGSG-VS-HiBiT or parental DLD-1 cells were transfected with plasmid DNA encoding HaloTag[22-297](M2F)-12×Gly/Ser-LgBiT. Approximately 48 hours post-transfection, the cells were labeled with 100 nM JF646 HaloTag® ligand. Confocal microscopy was performed using a blue channel (Ex. 405 nm), far-red channel (Ex. 640 nm), and DIC (Differential Interference Contrast). The laser and gain settings were carefully optimized to minimize saturated pixels, ensuring optimal image quality. These settings were consistently applied for collecting both the specific and background signals. For quantification, a single field of view (FOV) of PARP1-GGSG-HaloTag[3-19]-GGSG-VS-HiBiT DLD-1 cells was analyzed to measure the nuclear-localized fluorescence intensity for PARP1, while a separate FOV of parental cells was assessed to quantify the whole cell background fluorescence intensity. The intensity of individual cells analyzed by this strategy was used to generate datapoints on the plot. The bar represents the Mean of the data. The graph illustrates the heterogeneity of expression with plasmid DNA and highlights outliers resulting from higher expression that can influence the mean of the data. The imaging analysis correlates with cytometry assay data analysis, as the fold response of fluorescence in CRISPR cells does not significantly differ from the fluorescent intensity of parental cells. However, the distinguishing factor lies in the number of fluorescent cells within a defined gate in cytometry or with a threshold setting in imaging.

[0140] FIG. 118. Confocal Imaging of Live PARP1-HaloTag[3-19]-GGSG-VS-HiBiT DLD-1 Cells transiently transfected with HaloTag[22-297](M2F)-12×Gly/Ser-LgBiT mRNA. DLD-1 cells expressing endogenous PARP1-GGSG-HaloTag[3-19]-GGSG-VS-HiBiT (top row) or parental DLD-1 cells (bottom row) were transfected with 5 ng/well mRNA encoding HaloTag[22-297](M2F)-12×Gly/Ser-LgBiT. Approximately 24 hours post-transfection, the cells were labeled with 100 nM JF646 HaloTag® ligand. Following a 1-hour incubation, the cells were imaged using a confocal microscope in the blue channel (Ex. 405 nm), the far-red channel (Ex. 640 nm), along with DIC (Differential Interference Contrast). The laser and gain settings were optimized to minimize saturated pixels in each channel. The PARP1 protein naturally localizes within the cell nucleus. The images of the PARP1-GGSG-HaloTag[3-19]-GGSG-VS-HiBiT DLD-1 cells illustrates the far-red signal's localization in the nucleus, along with a noticeable colocalization of DAPI and JF646. The background signal from the non-complemented HaloTag[22-297](M2F)-12×Gly/Ser-LgBiT labeling exhibits whole-cell localization since excess HaloTag[22-297](M2F)-12×Gly/Ser-LgBiT expression also occurs in the cell cytoplasm. A comparison of confocal images depicting the expression of HaloTag[22-297](M2F)-12×Gly/Ser-LgBiT using plasmid DNA versus mRNA shows significantly more homogeneous expression with mRNA. These images also provide evidence that tagging the endogenous target, PARP1 protein, with GGSG-HaloTag[3-19]-GGSG-VS-HiBiT does not affect its localization.

[0141] FIG. 119. Quantification of Confocal Imaging of Live PARP1-HaloTag[3-19]-GGSG-VS-HiBiT DLD-1 Cells transiently transfected with HaloTag[22-297](M2F)-12×Gly/Ser-LgBiT mRNA. DLD-1 cells expressing endogenous PARP1-GGSG-HaloTag[3-19]-GGSG-VS-HiBiT or parental DLD-1 cells were transfected with 5 ng/well mRNA encoding HaloTag[22-297](M2F)-12×Gly/Ser-LgBiT. Approximately 24 hours post-transfection, cells were labeled with 100 nM JF646 HaloTag® ligand and incubated for 1 hour. Confocal microscopy was performed using a blue channel (Ex. 405 nm), far-red channel (Ex. 640 nm), and DIC (Differential Interference Contrast). The laser and gain settings were carefully optimized to minimize saturated pixels, ensuring optimal image quality. These settings were consistently applied for collecting both the specific and background signals. For quantification, a single field of view (FOV) of PARP1-GGSG-HaloTag[3-19]-GGSG-VS-HiBiT DLD-1 cells was analyzed to measure the nuclear-localized fluorescence intensity for PARP1, while a separate FOV of parental cells was assessed to quantify the whole cell background fluorescence intensity. The intensity of individual cells analyzed by this strategy was used to generate datapoints on the plot. The bar represents the Mean of the data. The graph demonstrates a higher level of homogeneity in expression with mRNA, with only a few outliers present. As a result, the mean (1215.003) and median (1192.750) values of the data are similar.

[0142] FIG. 120A-B. Dissociation kinetics of purified HaloTag[22-297](M2F)-12×Gly/Ser-LgBiT-3×Gly/Ser-6×His or LgBiT after complementation with synthetic peptide. FIG. 120(A) Purified HaloTag[22-297](M2F)-12×Gly/Ser-LgBiT-3×Gly/Ser-6×His (Reporter) or FIG. 120(B) LgBiT-6×His at 100 nM was combined with 200 nM HaloTag[3-19](I2R)-4×Gly/Ser-VS-HiBiT (Tag) or HiBiT synthetic peptides and incubated at 4° C. for 5 minutes. After preincubation with peptide, samples were diluted to 1 pM in either buffer alone or buffer 100 nM Tag peptide. At various time points, samples were transferred into luminescent substrate (Furimazine) to monitor dissociation of the complex. All measurements were performed in triplicate, and error bars represent one standard deviation from the mean.

[0143] FIG. 121A-C. Bioluminescence Resonance Energy Transfer (BRET) Enables Measurement of Purified HaloTag[22-297](M2F)-12×Gly/Ser-LgBiT-3×Gly/Ser-6×His Ligand Occupancy Across a Broad Range of Concentrations. Purified HaloTag[22-297](M2F)-12×Gly/Ser-LgBiT-3×Gly/Ser-6×His at 200 nM was combined with 2 μM HaloTag[3-19](I2R)-4×Gly/Ser-VS-HiBiT or VS-HiBiT synthetic peptide. After preincubation with peptide, complexes were serially diluted by half logs into buffer to give concentrations between 0.1 pM and 10 nM, plus buffer alone. These dilutions were added 1:1 to furimazine substrate in the presence or absence of 100 nM final concentration of HaloTag® NanoBRET® 618 Ligand. Luminescence was measured after about 1 min incubation for both FIG. 121(A) the luminescent donor signal using a 450 nm bandpass filter and FIG. 121(B) the luminescent acceptor signal using a 600 nm longpass filter. The BRET ratio FIG. 121(C) is determined by dividing the acceptor signal by the donor signal for each sample. All samples were performed in triplicate and error bars represent one standard deviation from the mean.

[0144] FIG. 122A-C. Bioluminescence Resonance Energy Transfer (BRET) Enables Measurement of Purified HaloTag[22-297](M2F)-12×Gly/Ser-LgBiT-3×Gly/Ser-6×His stabilization by synthetic peptide. Purified HaloTag[22-297](M2F)-12×Gly/Ser-LgBiT-3×Gly/Ser-6×His (Reporter) at 200 nM was combined with 2 μM HaloTag[3-19](12R)-4×Gly/Ser-VS-HiBiT (Tag) or VS-HiBiT synthetic peptide. After preincubation with peptide at 4° C., solutions were diluted 100-fold into buffer and incubated at room temperature. At time points, samples were added 1:1 to buffer either containing or lacking 10 nM final HaloTag® NanoBRET® 618 Ligand. For the reporter alone condition, samples were added 1:1 to a solution containing 10 nM final VS-HiBiT peptide with or without the 618 ligand in order to complement the LgBiT to create the BRET donor. After the last time point, furimazine substrate was added, followed by measuring the FIG. 122(A) luminescent donor signal using a 450 nm bandpass filter and FIG. 122(B) luminescent acceptor signal using a 600 nm longpass filter. The BRET ratio FIG. 122(C) is determined by dividing the acceptor signal by the donor signal for each sample.

[0145] FIG. 123A-B. Stabilization of HaloTag[22-297](M2F)-12×Gly/Ser-LgBiT Activity in the Presence of PARP1 Endogenously Tagged with HaloTag[3-19]-4×Gly/Ser-HiBiT in Live Cells Using Flow Cytometry. Separate mRNAs encoding FIG. 123(A) HaloTag[22-297](M2F)-12×Gly/Ser-LgBiT and EGFP or FIG. 123(B) HaloTag-LgBiT and EGFP were co-transfected into either parental DLD-1 (light grey) or PARP1-HaloTag[3-19]-4×Gly/Ser-VS-HiBiT DLD-1 (dark grey) cells. After 48 hours of expression, cells were labeled with 100 nM JF646 HaloTag® ligand for 60 minutes and then analyzed by flow cytometry. Stabilization of HaloTag[22-297](M2F)-12×Gly/Ser-LgBiT in the presence of PARP1-HaloTag[3-19]-4×Gly/Ser-VS-HiBiT results in increased JF646 HaloTag® ligand labeling of cells expressing both fragments relative to parental DLD-1 cells. Because the expression level and activity of HaloTag-LgBiT is not affected by the presence or absence of DualTag, its HaloTag® activity shows excellent proportionality with co-transfected EGFP, with a very similar distribution in both cell lines. The EGFP signal therefore represents a good indicator of the expression level in each cell of the co-transfected reporter.

[0146] FIG. 124. Stabilization of HaloTag[22-297](M2F)-12×Gly/Ser-LgBiT Activity in the Presence of PARP1 Endogenously Tagged with HaloTag[3-19]-4×Gly/Ser-HiBiT in Cells using Luminescence. mRNA encoding HaloTag[22-297](M2F)-12×Gly/Ser-LgBiT was transfected into either parental DLD-1 or PARP1-HaloTag[3-19]-4×Gly/Ser-VS-HiBiT DLD-1 cells. After 24 hours of expression, cells were treated with 50 μg/ml Cycloheximide (0 hour timepoint) and at subsequent timepoints replicate samples were lysed. To measure changes in total reporter levels, a lytic reagent containing excess HiBiT peptide and furimazine substrate was added at various time points. The ratio of luminescence signal for +/−Cycloheximide treated samples for each condition was calculated and then normalized to the initial ratio at 0 hours post-cycloheximide treatment. Half-life was calculated using a one phase exponential decay model. Five replicates were measured for each condition, and error bars represent one standard deviation from the mean.

[0147] FIG. 125. Gate Settings for Distinguishing JF646 Positive and Negative Cell Populations. The histogram displays the number of cells (Y-axis) versus their intensity with JF646 ligand (X-axis). A consistent gating strategy, developed using baseline activity from non-transfected cells, was applied across all transfected samples to accurately identify and quantify fluorescence activity. This strategy aligns with previous cytometry experiments, effectively excluding dead cells, cell debris, and aggregates.

[0148] FIG. 126A-B. Comparison of Fluorescent Intensity for HaloTag[22-297](M2F)-12×Gly/Ser-LgBiT and HaloTag[22-297](M2F+D53G+K140E)-12×Gly/Ser-LgBiT Variants Transiently Expressed using mRNA in Parental and a PARP1-GGSG-HaloTag[3-19]-GGSG-VS-HiBiT DLD-1 cell lines at 24 and 48 Hours Post-Transfection. Parental DLD-1 cells and DLD-1 cells expressing endogenous PARP1-GGSG-HaloTag[3-19]-GGSG-VS-HiBiT were transfected with mRNA encoding HaloTag[22-297](M2F)-12×Gly/Ser-LgBiT and HaloTag[22-297](M2F+D53G+K140E)-12×Gly/Ser-LgBiT variants. At approximately 24 hours post-transfection (A), and 48 hours post-transfection (B), the cells were labeled with 100 nM JF646 HaloTag® ligand. Following a 1-hour incubation, the cells underwent two 15-minute washes with DPBS media, totaling 30 minutes. Subsequently, the cells were detached, and their fluorescence activity was quantified using flow cytometry. A consistent gating strategy was used across all experiments to exclude dead cells, debris, and aggregates and identical gate settings were employed to distinguish between JF646 positive and negative populations. The values on the x-axis correspond to the mRNA concentration used for transfection in each well of a 96-well plate. Two technical replicates were performed for each construct. The error bars represent the standard deviation of the mean (SD) of the data. The absence of a bar in any assay condition indicates no detectable signal in the JF646 positive gate for the parental DLD-1 cells transfected with mRNA encoding HaloTag[22-297](M2F)-12×Gly/Ser-LgBiT and HaloTag[22-297](M2F+D53G+K140E)-12×Gly/Ser-LgBiT variants. The fluorescence intensity value for the no-mRNA control is zero in the JF646 positive gate. These graphs illustrate that fluorescent intensity approximately halves at 48 hours post-transfection compared to 24 hours.

[0149] FIG. 127A-B. Fold Response Comparison of HaloTag[22-297](M2F)-12×Gly/Ser-LgBiT and HaloTag[22-297](M2F+d53g+K140E)-12×Gly/Ser-LgBiT Variants Transiently Expressed Using mRNA in Parental and PARP1-GGSG-HaloTag[3-19]-GGSG-VS-HiBiT DLD-1 Cell Lines at 24 and 48 Hours Post-Transfection. Parental DLD-1 cells and DLD-1 cells expressing endogenous PARP1-GGSG-HaloTag[3-19]-GGSG-VS-HiBiT were transfected with mRNA encoding HaloTag[22-297](M2F)-12×Gly/Ser-LgBiT and HaloTag[22-297](M2F+D53G+K140E)-12×Gly/Ser-LgBiT variants. At approximately 24 hours post-transfection (A), and 48 hours post-transfection (B), the cells were labeled with 100 nM JF646 HaloTag® ligand. Following a 1-hour incubation, the cells underwent two 15-minute washes with DPBS media, totaling 30 minutes. Subsequently, the cells were detached, and their fluorescence activity was quantified using flow cytometry. A consistent gating strategy was used across all experiments to exclude dead cells, debris, and aggregates, and identical gate settings were employed to distinguish between JF646 positive and negative populations. The fold response of each assay condition was calculated as the ratio of mean fluorescence signal in the JF646+ gate for PARP1-GGSG-HaloTag[3-19]-GGSG-VS-HiBiT DLD-1 cells expressing HaloTag[22-297](M2F)-12×Gly/Ser-LgBiT and HaloTag[22-297](M2F+D53G+K140E)-12×Gly/Ser-LgBiT variants to the mean fluorescence intensity of DLD-1 parental cells expressing HaloTag[22-297](M2F)-12×Gly/Ser-LgBiT and HaloTag[22-297](M2F+D53G+K140E)-12×Gly/Ser-LgBiT variants in the same JF646+ gate. The values on the x-axis correspond to the mRNA concentration used for transfection in each well of a 96-well plate. The error bars represent the standard deviation of the mean (SD) of the data. The absence of a bar in any assay condition indicates no detectable signal in the JF646 positive gate for the parental DLD-1 cells transfected with mRNA encoding HaloTag[22-297](M2F)-12×Gly/Ser-LgBiT and HaloTag[22-297](M2F+D53G+K140E)-12×Gly/Ser-LgBiT variants. These results suggest no significant difference in fold response between assays run at 24- and 48-hours post-transfection. Additionally, it indicates higher fold responses at lower mRNA concentrations.

[0150] FIG. 128A-B. Comparison of Percentage of Cells Labeled with HaloTag[22-297](M2F)-12×Gly/Ser-LgBiT and HaloTag[22-297](M2F+D53G+K140E)-12×Gly/Ser-LgBiT Variants When Transiently Expressed Using mRNA in Parental and a PARP1-GGSG-HaloTag[3-19]-GGSG-VS-HiBiT DLD-1 Cell Lines at 24 and 48 Hours Post-Transfection. Parental DLD-1 cells and DLD-1 cells expressing endogenous PARP1-GGSG-HaloTag[3-19]-GGSG-VS-HiBiT were transfected with mRNA encoding HaloTag[22-297](M2F)-12×Gly/Ser-LgBiT and HaloTag[22-297](M2F+D53G+K140E)-12×Gly/Ser-LgBiT variants. After approximately 24 hours post-transfection (A) and 48 hours post-transfection (B), the cells were labeled with 100 nM JF646 HaloTag® ligand. Following a 1-hour incubation, the cells underwent two 15-minute washes with DPBS media, totaling 30 minutes. Subsequently, the cells were detached, and their fluorescence activity was quantified using flow cytometry. A consistent gating strategy was used across all experiments to exclude dead cells, debris, and aggregates and identical gate settings were employed to distinguish between JF646 positive and negative populations. The frequency of the parent for each assay condition was measured using the exact same gate setting for fluorescent intensity measurements. The values on the x-axis correspond to the mRNA concentration used for transfection in each well of a 96-well plate. Two technical replicates were performed for each construct. The error bars represent the standard deviation of the mean (SD) of the data. The absence of a bar in any assay condition indicates no detectable labeled cells in the JF646 positive gate for the parental DLD-1 cells transfected with mRNA encoding HaloTag[22-297](M2F)-12×Gly/Ser-LgBiT and HaloTag[22-297](M2F+D53G+K140E)-12×Gly/Ser-LgBiT variants. The fluorescence intensity value for the no-mRNA control is zero in the JF646 positive gate. These graphs illustrate that although fluorescent intensity decreases by approximately 50% at 48 hours post-transfection compared to 24 hours, there is a significant increase in the percentage of labeled PARP1-GGSG-HaloTag[3-19]-GGSG-VS-HiBiT DLD-1 cells expressing HaloTag® variants compared to labeled parental DLD-1 cells expressing the same variants at the JF646 positive gate. At mRNA concentrations of 0.2 ng/well, no labeled parental cells were detected, and less than 1% were detected at 2 ng/well. In contrast, on average 15% and 40% of the PARP1-GGSG-HaloTag[3-19]-GGSG-VS-HiBiT DLD-1 cells were labeled under these conditions, respectively. Therefore, for fluorescent sorting applications, it is recommended to conduct the assay 48 hours post-transfection. These results indicate that both HaloTag[22-297](M2F)-12×Gly/Ser-LgBiT and HaloTag[22-297](M2F+D53G+K140E)-12×Gly/Ser-LgBiT variants perform similarly in the cell cytometry assay. The latter variant demonstrates a slight improvement in fluorescence and the percentage of labeled cells' fold response.

[0151] FIG. 129A-B. Fluorescence Intensity Comparison of HaloTag[22-297](M2F)-12×Gly/Ser-LgBiT Variants in a Time-Lapse Ligand Incubation Cytometry Assay in DLD-1 Cell Lines. Panel A depicts the fluorescent intensity for HaloTag[22-297](M2F)-12×Gly/Ser-LgBiT, HaloTag[22-297](M2F+K140E)-12×Gly/Ser-LgBiT, and HaloTag[22-297](M2F+D53G+K140E)-12×Gly/Ser-LgBiT variants expressed in both parental and PARP1-GGSG-HaloTag[3-19]-GGSG-VS-HiBiT DLD-1 cell lines. These variants were transiently expressed using mRNA in both parental and PARP1-GGSG-HaloTag[3-19]-GGSG-VS-HiBiT DLD-1 cell lines. Approximately 48 hours post-transfection, cells were labeled with 100 nM JF646 HaloTag® ligand and incubated for varying durations (0.5, 2, 8, and 24 hours) before detachment and fluorescence quantification via flow cytometry. A consistent gating strategy was used across all experiments to exclude dead cells, debris, and aggregates and identical gate settings were employed to distinguish between JF646 positive and negative populations. Panel B illiterates fluorescence fold response of each variant over these time points. Fold response was calculated by comparing the mean fluorescence in the JF646+ gate of transfected PARP1-GGSG-HaloTag[3-19]-GGSG-VS-HiBiT DLD-1 cell line to that of the parental cells control in the same gate. Two technical replicates were performed for each construct. The error bars represent the standard deviation of the mean (SD) of the data. The fluorescence intensity value for the no-mRNA control is zero in the JF646 positive gate. These graphs illustrate that the HaloTag[22-297](M2F)-12×Gly/Ser-LgBiT, and HaloTag[22-297](M2F+D53G+K140E)-12×Gly/Ser-LgBiT variants exhibit similar fluorescent intensities, which are slightly higher than the fluorescent intensities of HaloTag[22-297](M2F+K140E)-12×Gly/Ser-LgBiT variant. The fluorescent intensities peak around two hours post-ligand addition. While the maximum fluorescent fold response is achieved approximately two hours after ligand incubation, the fold response for HaloTag[22-297](M2F+D53G+K140E)-12×Gly/Ser-LgBiT variant reaches its peaks at about 8-hour post ligand addition.

[0152] FIG. 130A-B. Comparison of Labeled Cell Percentages Among HaloTag[22-297](M2F)-12×Gly/Ser-LgBiT Variants in a Time-Lapse Ligand Incubation Cytometry Assay in DLD-1 Cell Lines. Panel A shows the percentage of cells labeled with HaloTag[22-297](M2F)-12×Gly/Ser-LgBiT, HaloTag[22-297](M2F+K140E)-12×Gly/Ser-LgBiT, and HaloTag[22-297](M2F+D53G+K140E)-12×Gly/Ser-LgBiT variants expressed in both parental and PARP1-GGSG-HaloTag[3-19]-GGSG-VS-HiBiT DLD-1 cell lines. These variants were transiently expressed using mRNA in both parental and PARP1-GGSG-HaloTag[3-19]-GGSG-VS-HiBiT DLD-1 cell lines. Approximately 48 hours post-transfection, cells were labeled with 100 nM JF646 HaloTag® ligand and incubated for varying durations (0.5, 2, 8, and 24 hours) before detachment and fluorescence quantification via flow cytometry. A consistent gating strategy was used across all experiments to exclude dead cells, debris, and aggregates and identical gate settings were employed to distinguish between JF646 positive and negative populations. Panel B illiterates the fold response of percentage of labeled cells (Frequency of Parent) of each variant over these time points. The fold response of each assay condition was calculated as the ratio of frequency of parent in the JF646+ gate for PARP1-GGSG-HaloTag[3-19]-GGSG-VS-HiBiT DLD-1 cells expressing the HaloTag[22-297](M2F)-12×Gly/Ser-LgBiT variants to the frequency of parent of DLD-1 parental cells expressing the HaloTag[22-297](M2F)-12×Gly/Ser-LgBiT variants in the same JF646+ gate. Two technical replicates were performed for each construct. The error bars represent the standard deviation of the mean (SD) of the data. The fluorescence intensity value for the no-mRNA control is zero in the JF646 positive gate. These graphs demonstrate that a longer ligand incubation time results in a better fold response for the frequency of parent. Approximately across all time points, the HaloTag[22-297](M2F+D53G+K140E)-12×Gly/Ser-LgBiT variant exhibits a slightly higher fold response compared to the other two HaloTag[22-297](M2F)-12×Gly/Ser-LgBiT, and HaloTag[22-297](M2F+K140E)-12×Gly/Ser-LgBiT variants.

[0153] FIG. 131. Quantification of Confocal Imaging of Live PARP1-HaloTag[3-19]-GGSG-VS-HiBiT DLD-1 Cells transiently transfected with HaloTag[22-297](M2F)-12×Gly/Ser-LgBiT, HaloTag[22-297](M2F+K140E)-12×Gly/Ser-LgBiT, and HaloTag[22-297](M2F+D53G+K140E)-12×Gly/Ser-LgBiT Variants' mRNA. Parental DLD-1 cells and DLD-1 cells expressing endogenous PARP1-GGSG-HaloTag[3-19]-GGSG-VS-HiBiT were transfected with 0.5 ng/well mRNA encoding HaloTag[22-297](M2F)-12×Gly/Ser-LgBiT, HaloTag[22-297](M2F+K140E)-12×Gly/Ser-LgBiT, and HaloTag[22-297](M2F+D53G+K140E)-12×Gly/Ser-LgBiT variants. Approximately 24 hours post-transfection, cells were labeled with 100 nM JF646 HaloTag ligand and incubated for 1 hour. Confocal microscopy was performed using a blue channel (Ex. 405 nm), far-red channel (Ex. 640 nm), and DIC (Differential Interference Contrast). Laser and gain settings were optimized to avoid pixel saturation, maintaining uniform intensity across all variants to capture specific and background signals. For quantification of each variant, a single field of view (FOV) of PARP1-GGSG-HaloTag[3-19]-GGSG-VS-HiBiT DLD-1 cells was analyzed to measure the nuclear-localized fluorescence intensity for PARP1, while a separate FOV of parental cells was assessed to quantify the whole cell background fluorescence intensity. The intensity of individual cells analyzed by this strategy was used to generate datapoints on the plot. The bar represents the Mean of the data. The graph demonstrates a higher level of homogeneity in expression with mRNA, with only a few outliers present. The results suggest similar fluorescence fold responses among the variants.

[0154] FIG. 132. Labeling kinetics of HaloTag7 and HaloTag[22-297](M2F+D53G+K140E)-12×Gly/Ser-LgBiT-3×Gly/Ser-6×His with HaloTag ligand JF549. Fluorescence polarization was monitored over time to observe labeling kinetics of JF549 HaloTag ligand by HaloTag standard protein or HaloTag[22-297](M2F+D53G+K140E)-12×Gly/Ser-LgBiT-3×Gly/Ser-6×His. The experiment was completed in Tris-buffered saline+0.01% CHAPS with proteins at 10 nM and ligand at 2.5 nM.

[0155] FIG. 133. Labeling kinetics of HaloTag7 and HaloTag[22-297](M2F+D53G+K140E)-12×Gly/Ser-LgBiT-3×Gly/Ser-6×His with HaloTag ligand JF503. Fluorescence polarization was monitored over time to observe labeling kinetics of JF503 HaloTag ligand by HaloTag standard protein or HaloTag[22-297](M2F+D53G+K140E)-12×Gly/Ser-LgBiT-3×Gly/Ser-6×His. The experiment was completed in Tris-buffered saline+0.01% CHAPS with proteins at 10 nM and ligand at 2.5 nM.

[0156] FIG. 134. Labeling kinetics of HaloTag7 and HaloTag[22-297](M2F+D53G+K140E)-12×Gly/Ser-LgBiT-3×Gly/Ser-6×His with HaloTag ligand JFX554. Fluorescence polarization was monitored over time to observe labeling kinetics of JFX554 HaloTag ligand by HaloTag standard protein or HaloTag[22-297](M2F+D53G+K140E)-12×Gly/Ser-LgBiT-3×Gly/Ser-6×His. The experiment was completed in Tris-buffered saline+0.01% CHAPS with proteins at 10 nM and ligand at 2.5 nM.

[0157] FIG. 135. Labeling kinetics of HaloTag7 and HaloTag[22-297](M2F+D53G+K140E)-12×Gly/Ser-LgBiT-3×Gly/Ser-6×His with HaloTag ligand Oregon Green. Fluorescence polarization was monitored over time to observe labeling kinetics of Oregon Green HaloTag ligand by HaloTag standard protein or HaloTag[22-297](M2F+D53G+K140E)-12×Gly/Ser-LgBiT-3×Gly/Ser-6×His. The experiment was completed in Tris-buffered saline+0.01% CHAPS with proteins at 10 nM and ligand at 2.5 nM.

[0158] FIG. 136. Labeling kinetics of HaloTag7 and HaloTag[22-297](M2F+D53G+K140E)-12×Gly/Ser-LgBiT-3×Gly/Ser-6×His with a FAM HaloTag ligand. Fluorescence polarization was monitored over time to observe labeling kinetics of FAM HaloTag ligand by HaloTag standard protein or HaloTag[22-297](M2F+D53G+K140E)-12×Gly/Ser-LgBiT-3×Gly/Ser-6×His. The experiment was completed in Tris-buffered saline+0.01% CHAPS with proteins at 10 nM and ligand at 2.5 nM.

### DEFINITIONS

[0159] Although any methods and materials similar or equivalent to those described herein can be used in the practice or testing of embodiments described herein, some preferred methods, compositions, devices, and materials are described herein. However, before the present materials and methods are described, it is to be understood that this invention is not limited to the particular molecules, compositions, methodologies, or protocols herein described, as these may vary in accordance with routine experimentation and optimization. It is also to be understood that the terminology used in the description is for the purpose of describing the particular versions or embodiments only, and is not intended to limit the scope of the embodiments described herein.

[0160] Unless otherwise defined, all technical and scientific terms used herein have the same meaning as commonly understood by one of ordinary skill in the art to which this invention belongs. However, in case of conflict, the present specification, including definitions, will control. Accordingly, in the context of the embodiments described herein, the following definitions apply.

[0161] As used herein and in the appended claims, the singular forms “a,” “an,” and “the” include plural reference unless the context clearly dictates otherwise. Thus, for example, reference to “a polypeptide” is a reference to one or more polypeptides and equivalents thereof known to those skilled in the art, and so forth.

[0162] As used herein, the term “and/or” includes any and all combinations of listed items, including any of the listed items individually. For example, “A, B, and/or C” encompasses A, B, C, AB, AC, BC, and ABC, each of which is to be considered separately described by the statement “A, B, and/or C.”

[0163] As used herein, the term “comprise” and linguistic variations thereof denote the presence of recited feature(s), element(s), method step(s), etc., without the exclusion of the presence of additional feature(s), element(s), method step(s), etc. Conversely, the term “consisting of” and linguistic variations thereof, denotes the presence of recited feature(s), element(s), method step(s), etc., and excludes any unrecited feature(s), element(s), method step(s), etc., except for ordinarily-associated impurities. The phrase “consisting essentially of” denotes the recited feature(s), element(s), method step(s), etc., and any additional feature(s), element(s), method step(s), etc., that do not materially affect the basic nature of the composition, system, or method. Many embodiments herein are described using open “comprising” language. Such embodiments encompass multiple closed “consisting of” and/or “consisting essentially of” embodiments, which may alternatively be claimed or described using such language.

[0164] As used herein, the term “substantially” means that the recited characteristic, parameter, and/or value need not be achieved exactly, but that deviations or variations, including for example, tolerances, measurement error, measurement accuracy limitations and other factors known to skill in the art, may occur in amounts that do not preclude the effect the characteristic was intended to provide. A characteristic or feature that is substantially absent (e.g., substantially non-fluorescent) may be one that is within the noise, beneath background, below the detection capabilities of the assay being used, or a small fraction (e.g., <1%, <0.1%, <0.01%, <0.001%, <0.00001%, <0.000001%, <0.0000001%) of the significant characteristic (e.g., fluorescent intensity of an active fluorophore).

[0165] As used herein, when referring to amino acid sequences or positions within an amino acid sequence, the phrase “corresponding to” refers to the relative position of an amino acid residue or an amino acid segment with the sequence being referred to, not necessarily the specific identity of the amino acids at that position. For example, a “peptide corresponding to positions 36 through 48 of SEQ ID NO: 1” may comprise less than 100% sequence identity with positions 36 through 48 of SEQ ID NO: 1 (e.g., >70% sequence identity), but within the context of the composition or system being described the peptide relates to those positions.

[0166] As used herein, the term “system” refers to multiple components (e.g., devices, compositions, etc.) that find use for a particular purpose. For example, two separate biological molecules, whether present in the same composition or not, may comprise a system if they are useful together for a shared purpose.

[0167] As used herein, the term “complementary” refers to the characteristic of two or more structural elements (e.g., peptide, polypeptide, nucleic acid, small molecule, etc.) of being able to hybridize, dimerize, or otherwise form a complex with each other. For example, a “complementary peptide and polypeptide” are capable of coming together to form a complex. Complementary elements may require assistance (facilitation) to form a complex (e.g., from interaction elements), for example, to place the elements in the proper conformation for complementarity, to place the elements in the proper proximity for complementarity, to co-localize complementary elements, to lower interaction energy for complementary, to overcome insufficient affinity for one another, etc.

[0168] As used herein, the term “complex” refers to an assemblage or aggregate of molecules (e.g., peptides, polypeptides, etc.) in direct and/or indirect contact with one another. In one aspect, “contact,” or more particularly “direct contact,” means two or more molecules are close enough so that attractive noncovalent interactions, such as Van der Waal forces, hydrogen bonding, ionic and hydrophobic interactions, and the like, dominate the interaction of the molecules. In such an aspect, a complex of molecules (e.g., peptides, polypeptides, etc.) is formed under assay conditions such that the complex is thermodynamically favored (e.g., compared to a non-aggregated, or non-complexed, state of its component molecules). As used herein the term “complex,” unless described as otherwise, refers to the assemblage of two or more molecules (e.g., peptides, polypeptides, etc.).

[0169] As used herein, the term “interaction element” refers to a moiety that assists or facilitates the bringing together of two or more structural elements (e.g., peptides, polypeptides, etc.) to form a complex. In some embodiments, a pair of interaction elements (a.k.a. “interaction pair”) is attached to a pair of structural elements (e.g., peptides, polypeptides, etc.), and the attractive interaction between the two interaction elements facilitate formation of a complex of the structural elements. Interaction elements may facilitate formation of a complex by any suitable mechanism (e.g., bringing structural elements into proximity, placing structural elements in proper conformation for stable interaction, reducing activation energy for complex formation, combinations thereof, etc.). An interaction element may be a protein, polypeptide, peptide, small molecule, cofactor, nucleic acid, lipid, carbohydrate, antibody, etc. An interaction pair may be made of two of the same interaction elements (i.e., homopair) or two different interaction elements (i.e., heteropair). In the case of a heteropair, the interaction elements may be the same type of moiety (e.g., polypeptides) or may be two different types of moieties (e.g., polypeptide and small molecule). In some embodiments, in which complex formation by the interaction pair is studied, an interaction pair may be referred to as a “target pair” or a “pair of interest,” and the individual interaction elements are referred to as “target elements” (e.g., “target peptide,” “target polypeptide,” etc.) or “elements of interest” (e.g., “peptide of interest,” “polypeptide or interest,” etc.).

[0170] As used herein, the term “low affinity” describes an intermolecular interaction between two or more entities that is too weak to result in significant complex formation between the entities, except at concentrations substantially higher (e.g., 2-fold, 5-fold, 10-fold, 100-fold, 1000-fold, or more) than physiologic or assay conditions, or with facilitation from the formation of a second complex of attached elements (e.g., interaction elements).

[0171] As used herein, the term “high affinity” describes an intermolecular interaction between two or more (e.g., three) entities that is of sufficient strength to produce detectable complex formation under physiologic or assay conditions without facilitation from the formation of a second complex of attached elements (e.g., interaction elements).

[0172] As used herein, the term “preexisting protein” refers to an amino acid sequence that was in physical existence prior to a certain event or date. A “peptide that is not a fragment of a preexisting protein” is a short amino acid chain that is not a fragment or sub-sequence of a protein (e.g., synthetic or naturally-occurring) that was in physical existence prior to the design and/or synthesis of the peptide.

[0173] As used herein, the term “fragment” refers to a peptide or polypeptide that results from dissection or “fragmentation” of a larger whole entity (e.g., protein, polypeptide, enzyme, etc.), or a peptide or polypeptide prepared to have the same sequence as such. Therefore, a fragment is a subsequence of the whole entity (e.g., protein, polypeptide, enzyme, etc.) from which it is made and/or designed. A peptide or polypeptide that is not a subsequence of a preexisting whole protein is not a fragment (e.g., not a fragment of a preexisting protein). A peptide or polypeptide that is “not a fragment of a preexisting protein” is an amino acid chain that is not a subsequence of a protein (e.g., natural or synthetic) that was in physical existence prior to design and/or synthesis of the peptide or polypeptide. A fragment of a hydrolase or dehalogenase, as used herein, is a sequence which is less than the full-length sequence, but which alone cannot form a substrate binding site, and/or has substantially reduced or no substrate binding activity but which, in close proximity to a second fragment of a hydrolase or dehalogenase, exhibits substantially increased substrate binding activity. In one embodiment, a fragment of a hydrolase or dehalogenase is at least 5, e.g., at least 10, at least 20, at least 30, at least 40, or at least 50, contiguous residues of a wild-type hydrolase or a mutated hydrolase, or a sequence with at least 70% sequence identity thereto, and may not necessarily include the N-terminal or C-terminal residue or N-terminal or C-terminal sequences of the corresponding full length protein.

[0174] As used herein, the term “subsequence” refers to peptide or polypeptide that has 100% sequence identify with a portion of another, larger peptide, or polypeptide. The subsequence is a perfect sequence match for a portion of the larger amino acid chain.

[0175] The term “amino acid” refers to natural amino acids, unnatural amino acids, and amino acid analogs, all in their D and L stereoisomers, unless otherwise indicated, if their structures allow such stereoisomeric forms.

[0176] The term “proteinogenic amino acids” refers to the 20 amino acids coded for in the human genetic code, and includes alanine (Ala or A), arginine (Arg or R), asparagine (Asn or N), aspartic acid (Asp or D), cysteine (Cys or C), glutamine (Gln or Q), glutamic acid (Glu or E), glycine (Gly or G), histidine (His or H), isoleucine (Ile or I), leucine (Leu or L), Lysine (Lys or K), methionine (Met or M), phenylalanine (Phe or F), proline (Pro or P), serine (Ser or S), threonine (Thr or T), tryptophan (Trp or W), tyrosine (Tyr or Y) and valine (Val or V). Selenocysteine and pyrrolysine may also be considered proteinogenic amino acids

[0177] The term “non-proteinogenic amino acid” refers to an amino acid that is not naturally-encoded or found in the genetic code of any organism, and is not incorporated biosynthetically into proteins during translation. Non-proteinogenic amino acids may be “unnatural amino acids” (amino acids that do not occur in nature) or “naturally-occurring non-proteinogenic amino acids” (e.g., norvaline, ornithine, homocysteine, etc.). Examples of non-proteinogenic amino acids include, but are not limited to, azetidinecarboxylic acid, 2-aminoadipic acid, 3-aminoadipic acid, beta-alanine, naphthylalanine, aminopropionic acid, 2-aminobutyric acid, 4-aminobutyric acid, 6-aminocaproic acid, 2-aminoheptanoic acid, 2-aminoisobutyric acid, 3-aminoisbutyric acid, 2-aminopimelic acid, tertiary-butylglycine, 2,4-diaminoisobutyric acid, desmosine, 2,2′-diaminopimelic acid, 2,3-diaminopropionic acid, N-ethylglycine, N-ethylasparagine, homoproline, hydroxylysine, allo-hydroxylysine, 3-hydroxyproline, 4-hydroxyproline, isodesmosine, allo-isoleucine, N-methylalanine, N-alkylglycine including N-methylglycine, N-methylisoleucine, N-alkylpentylglycine including N-methylpentylglycine. N-methylvaline, naphthylalanine, norvaline, norleucine (“Norleu”), octylglycine, ornithine, pentylglycine, pipecolic acid, thioproline, homolysine, and homoarginine. Non-proteinogenic also include D-amino acid forms of any of the amino acids herein, as well as non-alpha amino acid forms of any of the amino acids herein (beta-amino acids, gamma-amino acids, delta-amino acids, etc.), all of which are in the scope herein and may be included in peptides herein.

[0178] The term “amino acid analog” refers to an amino acid (e.g., natural or unnatural, proteinogenic or non-proteinogenic) where one or more of the C-terminal carboxy group, the N-terminal amino group and side-chain bioactive group has been chemically blocked, reversibly or irreversibly, or otherwise modified to another bioactive group. For example, aspartic acid-(beta-methyl ester) is an amino acid analog of aspartic acid; N-ethylglycine is an amino acid analog of glycine; or alanine carboxamide is an amino acid analog of alanine. Other amino acid analogs include methionine sulfoxide, methionine sulfone, S-(carboxymethyl)-cysteine, S-(carboxymethyl)-cysteine sulfoxide, and S-(carboxymethyl)-cysteine sulfone.

[0179] As used herein, unless otherwise specified, the terms “peptide” and “polypeptide” refer to polymer compounds of two or more amino acids joined through the main chain by peptide amide bonds (—C(O)NH—). The term “peptide” typically refers to short amino acid polymers (e.g., chains having fewer than 30 amino acids), whereas the term “polypeptide” typically refers to longer amino acid polymers (e.g., chains having more than 30 amino acids).

[0180] As used herein, the terms “artificial” or “synthetic” refer to compositions and systems that are designed or prepared by man and are not naturally occurring. For example, an artificial or synthetic peptide, peptoid, or nucleic acid is one comprising a non-natural sequence (e.g., a peptide without 100% identity with a naturally-occurring protein or a fragment thereof).

[0181] As used herein, a “conservative” amino acid substitution refers to the substitution of an amino acid in a peptide or polypeptide with another amino acid having similar chemical properties such as size or charge. For purposes of the present disclosure, each of the following eight groups contains amino acids that are conservative substitutions for one another:
[0182] 1) Alanine (A) and Glycine (G);
[0183] 2) Aspartic acid (D) and Glutamic acid (E);
[0184] 3) Asparagine (N) and Glutamine (Q);
[0185] 4) Arginine (R) and Lysine (K);
[0186] 5) Isoleucine (I), Leucine (L), Methionine (M), and Valine (V);
[0187] 6) Phenylalanine (F), Tyrosine (Y), and Tryptophan (W);
[0188] 7) Serine (S) and Threonine (T); and
[0189] 8) Cysteine (C) and Methionine (M).

[0190] Amino acid residues may be divided into classes based on common side chain properties, for example: polar positive (or basic) (e.g., histidine (H), lysine (K), and arginine (R)); polar negative (or acidic) (e.g., aspartic acid (D), glutamic acid (E)); polar neutral (e.g., serine (S), threonine (T), asparagine (N), glutamine (Q)); non-polar aliphatic (e.g., alanine (A), valine (V), leucine (L), isoleucine (I), methionine (M)); non-polar aromatic (e.g., phenylalanine (F), tyrosine (Y), tryptophan (W)); proline and glycine; and cysteine. As used herein, a “semi-conservative” amino acid substitution refers to the substitution of an amino acid in a peptide or polypeptide with another amino acid within the same class.

[0191] In some embodiments, unless otherwise specified, a conservative or semi-conservative amino acid substitution may also encompass non-naturally occurring amino acid residues that have similar chemical properties to the natural residue. These non-natural residues are typically incorporated by chemical peptide synthesis rather than by synthesis in biological systems. These include, but are not limited to, peptidomimetics and other reversed or inverted forms of amino acid moieties. Embodiments herein may, in some embodiments, be limited to natural amino acids, non-natural amino acids, and/or amino acid analogs.

[0192] Non-conservative substitutions may involve the exchange of a member of one class for a member from another class.

[0193] As used herein, the term “sequence identity” refers to the degree two polymer sequences (e.g., peptide, polypeptide, nucleic acid, etc.) have the same sequential composition of monomer subunits. The term “sequence similarity” refers to the degree with which two polymer sequences (e.g., peptide, polypeptide, nucleic acid, etc.) have similar polymer sequences. For example, similar amino acids are those that share the same biophysical characteristics and can be grouped into the families, e.g., acidic (e.g., aspartate, glutamate), basic (e.g., lysine, arginine, histidine), non-polar (e.g., alanine, valine, leucine, isoleucine, proline, phenylalanine, methionine, tryptophan) and uncharged polar (e.g., glycine, asparagine, glutamine, cysteine, serine, threonine, tyrosine). The “percent sequence identity” (or “percent sequence similarity”) is calculated by: (1) comparing two optimally aligned sequences over a window of comparison (e.g., the length of the longer sequence, the length of the shorter sequence, a specified window), (2) determining the number of positions containing identical (or similar) monomers (e.g., same amino acids occurs in both sequences, similar amino acid occurs in both sequences) to yield the number of matched positions, (3) dividing the number of matched positions by the total number of positions in the comparison window (e.g., the length of the longer sequence, the length of the shorter sequence, a specified window), and (4) multiplying the result by 100 to yield the percent sequence identity or percent sequence similarity. For example, if peptides A and B are both 20 amino acids in length and have identical amino acids at all but 1 position, then peptide A and peptide B have 95% sequence identity. If the amino acids at the non-identical position shared the same biophysical characteristics (e.g., both were acidic), then peptide A and peptide B would have 100% sequence similarity. As another example, if peptide C is 20 amino acids in length and peptide D is 15 amino acids in length, and 14 out of 15 amino acids in peptide D are identical to those of a portion of peptide C, then peptides C and D have 70% sequence identity, but peptide D has 93.3% sequence identity to an optimal comparison window of peptide C. For the purpose of calculating “percent sequence identity” (or “percent sequence similarity”) herein, any gaps in aligned sequences are treated as mismatches at that position.

[0194] Any peptide/polypeptides described herein as having a particular percent sequence identity or similarity (e.g., at least 70%) with a reference sequence ID number, may also be expressed as having a maximum number of substitutions (or terminal deletions) with respect to that reference sequence. For example, a sequence having at least Y % sequence identity (e.g., 90%) with SEQ ID NO:Z (e.g., 100 amino acids) may have up to X substitutions (e.g., 10) relative to SEQ ID NO:Z, and may therefore also be expressed as “having X (e.g., 10) or fewer substitutions relative to SEQ ID NO:Z.”

[0195] As used herein, the term “wild-type” refers to a gene or gene product (e.g., protein, polypeptide, peptide, etc.) that has the characteristics (e.g., sequence) of that gene or gene product isolated from a naturally occurring source, and is most frequently observed in a population. In contrast, the term “mutant” or “variant” refers to a gene or gene product that displays modifications in sequence when compared to the wild-type gene or gene product. It is noted that “naturally-occurring variants” are genes or gene products that occur in nature, but have altered sequences when compared to the wild-type gene or gene product; they are not the most commonly occurring sequence. “Artificial variants” or “synthetic variants” are genes or gene products that have altered sequences when compared to the wild-type gene or gene product and do not occur in nature. Variant genes or gene products may be naturally occurring sequences that are present in nature, but not the most common variant of the gene or gene product, or “synthetic,” produced by human or experimental intervention.

[0196] As used herein, the term “physiological conditions” encompasses any conditions compatible with living cells, e.g., predominantly aqueous conditions of a temperature, pH, salinity, chemical makeup, etc. that are compatible with living cells.

[0197] As used herein, the term “sample” is used in its broadest sense. In one sense, it is meant to include a specimen or culture obtained from any source, as well as biological and environmental samples. Biological samples may be obtained from animals (including humans) and encompass fluids, solids, tissues, and gases. Biological samples include blood products, such as plasma, serum, and the like. Sample may also refer to cell lysates or purified forms of the enzymes, peptides, and/or polypeptides described herein. Cell lysates may include cells that have been lysed with a lysing agent or lysates such as rabbit reticulocyte or wheat germ lysates. Sample may also include cell-free expression systems. Environmental samples include environmental material such as surface matter, soil, water, crystals, and industrial samples. Such examples are not however to be construed as limiting the sample types applicable to the present invention.

[0198] As used herein, the terms “fusion,” “fusion polypeptide,” and “fusion protein” refer to a chimeric protein containing a first protein or polypeptide of interest joined to a second different peptide, polypeptide, or protein (e.g., interaction element).

[0199] As used herein, the terms “conjugated” and “conjugation” refer to the covalent attachment of two molecular entities (e.g., post-synthesis and/or during synthetic production). The attachment of a peptide or small molecule tag to a protein or small molecule, chemically (e.g., “chemically” conjugated) or enzymatically, is an example of conjugation.

[0200] As used herein, the terms “polypeptide component” or “peptide component” are used synonymously with the terms “polypeptide component of a [mutant dehalogenase] complex” or “peptide component of a [mutant dehalogenase] complex.” Typically, as used herein, a polypeptide component or peptide component is capable of forming a complex with a second component to form a desired complex, under appropriate conditions.

[0201] As used herein, the term “dehalogenase” refers to an enzyme that catalyzes the removal of a halogen atom from a substrate. The term “haloalkane dehalogenase” refers to an enzyme that catalyzes the removal of a halogen from a haloalkane substrate to produce an alcohol and a halide. Dehalogenases and haloalkyl dehalogenases belong to the hydrolase enzyme family, and may be referred to herein or elsewhere as such.

[0202] As used herein, the term “modified dehalogenase” refers to a dehalogenase variant (artificial variant) that has mutations that prevent the release of the substrate from the protein following removal of the halogen, resulting in a covalent bond between the substrate and the modified dehalogenase. Because the modified dehalogenase does not release the substrate, it is not capable of turnover, and is not a classical enzyme. The HALOTAG system (Promega) is a commercially available modified dehalogenase and substrate system.

[0203] As used herein, the term “bioluminescence” refers to production and emission of light by a chemical reaction catalyzed by, or enabled by, an enzyme, protein, protein complex, or other biomolecule (e.g., bioluminescent complex). In typical embodiments, a substrate for a bioluminescent entity (e.g., bioluminescent protein or bioluminescent complex) is converted into an unstable form by the bioluminescent entity; the substrate subsequently emits light.

[0204] As used herein, the term “non-luminescent” refers to an entity (e.g., peptide, polypeptide, complex, protein, etc.) that exhibits the characteristic of not emitting a detectable amount of light in the visible spectrum (e.g., in the presence of a substrate). For example, an entity may be referred to as non-luminescent if it does not exhibit detectable luminescence in a given assay. As used herein, the term “non-luminescent” is synonymous with the term “substantially non-luminescent. In some embodiments, an entity is considered “non-luminescent” if any light emission is sufficiently minimal so as not to create interfering background for a particular assay.

[0205] As used herein, the terms “non-luminescent peptide” and “non-luminescent polypeptide” refer to peptides and polypeptides that exhibit substantially no luminescence (e.g., in the presence of a substrate), or an amount that is beneath the noise (e.g., 100-fold, 200-fold, 500-fold, 1×10³-fold, 1×10⁴-fold, 1×10⁵-fold, 1×10⁶-fold, 1×10⁷-fold, etc.), when compared to a significant signal (e.g., a bioluminescent complex) under standard conditions (e.g., physiological conditions, assay conditions, etc.) and with typical instrumentation (e.g., luminometer, etc.). In some embodiments, such non-luminescent peptides and polypeptides assemble, according to the criteria described herein, to form a bioluminescent complex.

[0206] As used herein, the term “an Oplophorus luciferase” (“an OgLuc”) refers to a luminescent polypeptide having significant sequence identity, structural conservation, and/or the functional activity of the luciferase produce by and derived from the deep-sea shrimp Oplophorus gracilirostris. In particular, an OgLuc polypeptide refers to a luminescent polypeptide having significant sequence identity, structural conservation, and/or the functional activity of the mature 19 kDa subunit of the Oplophorus luciferase protein complex (e.g., without a signal sequence) such as SEQ ID NOs: 3034 (NanoLuc), which comprises 10 β strands (β1, β2, β3, β4, β5, β6, β7, β8, β9, β10) and utilize substrates such as coelenterazine or a coelenterazine derivative or analog to produce luminescence.

[0207] As used herein, the term “β9-like peptide” refers to a peptide (or peptide tag) comprising significant sequence identity, structural conservation, and/or the functional activity of the β (beta) 9 strand of an OgLuc polypeptide. In particular, a β9-like peptide is a peptide capable of structurally complementing an OgLuc polypeptide lacking a 39 strand resulting in enhanced luminescence of the complex compared to the OgLuc polypeptide in the absence of the β9-like peptide. Other “βX-like peptides” may be similarly named (e.g., β1-like, β2-like, β3-like, β4-like, β5-like, β6-like, β7-like, β8-like, β9-like).

[0208] As used herein, the term “β10-like peptide” refers to a peptide (or peptide tag) comprising significant sequence identity, structural conservation, and/or the functional activity of the β (beta) 10 strand of an OgLuc polypeptide. In particular, a β10-like peptide is a peptide capable of structurally complementing an OgLuc polypeptide lacking a 010 strand resulting in enhanced luminescence of the complex compared to the OgLuc polypeptide in the absence of the β10-like peptide. Other “βX-like peptides” may be similarly named (e.g., β1-like, β2-like, β3-like, β4-like, β5-like, β6-like, β7-like, β8-like, β9-like).

[0209] As used herein, the term “β₁₋₈-like polypeptide” refers to a polypeptide bearing sequence and structural similarity to R (beta) strands 1-8 of an OgLuc polypeptide, but lacking β (beta) strands 9 and 10. Other “β_{Y-Z}-like polypeptides” may be similarly named (e.g., β₁₋₄-like polypeptide, β2-8-like polypeptide, β₅₋₁₀-like polypeptide, etc.).

[0210] As used herein, the term “NANOLUC” refers to an artificial luciferase or bioluminescent polypeptide produced commercially by the Promega Corporation.

[0211] As used herein, the term “LgBiT” refers to a polypeptide corresponding to β₁₋₉-like polypeptide that finds use in, for example, binary complementation to form a bioluminescent complex and corresponds to SEQ ID NO: 3037.

[0212] As used herein, the term “SmBiT” refers to a peptide corresponding to β₁₀-like peptide that finds use in, for example, binary complementation to form a bioluminescent complex, but has low affinity for LgBiT (e.g., requires facilitation for complex formation) and corresponds to SEQ ID NO: 3039.

[0213] As used herein, the term “HiBiT” refers to a peptide corresponding to β₁₀-like peptide that finds use in, for example, binary complementation to form a bioluminescent complex, but has high affinity for LgBiT (e.g., does not require facilitation for complex formation). An exemplary HiBiT peptide corresponds to SEQ ID NO: 3038.

[0214] As used herein, the term “LgTrip” refers to a polypeptide corresponding to β₁₋₈-like polypeptide. An exemplary LgTrip corresponds to SEQ ID NO: 3045 and finds use in, for example, tripartite complementation with β₉-like and β₁₀-like peptides to form a bioluminescent complex, or binary complementation, with a β₉₋₁₀-like peptide to form a bioluminescent complex.

[0215] As used herein, the term “SmTrip10” refers to a peptide corresponding to β₁₀-like peptide that finds use in, for example, tripartite complementation to form a bioluminescent complex.

[0216] As used herein, the term “SmTrip9” refers to a peptide corresponding to β₉-like peptide that finds use in, for example, tripartite complementation to form a bioluminescent complex. As used herein, the term “split” (“sp”) refers to refers to a polypeptide that has been divided into two fragments at an interior site of the original polypeptide. The fragments of a sp polypeptide may reconstitute activity of the original polypeptide if they are structurally complementary and able to form an active complex. Nomenclature herein for referring to split components of a polypeptide recites a position number from the full polypeptide that corresponds to the last residue in the N-terminal component of the split polypeptide. For example, if a polypeptide is 100 residues in length, a sp52 version of that polypeptide comprises a first fragment corresponding to positions 1-52 of the parent polypeptide and a second fragment corresponding to positions 53-100 of the parent polypeptide. As another example, spHT(45) refers to a split variant of the commercially-available HALOTAG protein in which the first fragment comprises residues 1-45 of the HALOTAG polypeptide sequence and the second fragment comprises residues 46-297 of the HALOTAG polypeptide sequence.

[0217] Alternatively, a component of a split polypeptide may be expressed herein by referring to the name of the polypeptide from which it is derived, the residues within the source polypeptide that are present in the component (in brackets), followed by any substitutions in the component relative to the source polypeptide (in parenthesis). For example, a split component of the commercially-available HALOTAG protein corresponding to position 22-297 of the HALOTAG sequence could be written HaloTag[22-297]. If the second position of the component contained a M to F substitution, the components could be referred to as HaloTag[22-297](M2F). Components may contain an N-terminal methionine residues not present in the source sequence; such residues are counted in refereeing to the location of substitutions but not in the numbering of the fragment within the source polypeptide.

[0218] As used herein, the term “gapped” refers to split variant of a polypeptide that is missing a segment of the original polypeptide. For example, a “gapped sp polypeptide” is one that is missing a segment of the original sequence that occurs at the site of the split.

[0219] As used herein, the term “overlapped” refers to split variant of a polypeptide that contains a duplication of a segment of the original polypeptide. For example, an “overlapped sp polypeptide” is one in which a segment of the original sequence adjacent to the split site is present (duplicated) at the C-terminus of a first fragment and the N-terminus of the second fragment.

[0220] The term “binding moiety” refers to a domain that specifically binds an antigen or epitope independently of a different epitope or antigen binding domain. A binding moiety may be an antibody, antibody fragment, a receptor domain that binds a target ligand, proteins that bind to immunoglobulins (e.g., protein A, protein G, protein A/G, protein L, protein M), a binding domain of a proteins that bind to immunoglobulins (e.g., protein A, protein G, protein A/G, protein L, protein M), oligonucleotide probe, peptide nucleic acid, DARPin, aptamer, affimer, a purified protein (either the analyte itself or a protein that binds to the analyte), and analyte binding domain(s) of proteins etc. Table A provides a list of exemplary binding moieties that could be used singly or in various combinations in methods, systems, and assays (e.g., immunoassays) herein.

TABLE A
Exemplary binding moieties

Protein A
Ig Binding domain of protein A
Protein G
Ig Binding domain of protein G
Protein L
Ig Binding domain of protein L
Protein M
Ig Binding domain of protein M
polyclonal antibody against analyte X
monoclonal antibody
recombinant antibody
scFv
variable light chain (V_{L}) of antibody
(monoclonal, recombinant, polyclonal)
recognizing target analyte X
protein (e.g., receptor) binding domain that
binds to analyte X
(Fab) fragment
Fab′ fragment
Fv fragment
F(ab′)2 fragment
oligonucleotide probe
DARPins and other synthetic binding
scaffolds (ex: Bicycles)
peptide nucleic acid
aptamer
affimer

### DETAILED DESCRIPTION

[0221] Provided herein are compositions and systems comprising complementation-based tags and reporters for labeling and detection of targets by luminescence and a second modality (e.g., fluorescence), and methods of use thereof. In particular, tags are provided comprising the fusion of a first component of bioluminescent complex and a first component of modified dehalogenase complex, reporters are provided comprising the second component of bioluminescent complex and the second component of modified dehalogenase complex, and systems and methods are provided comprising the tags and reporters herein for dual-modality labeling and detection of targets

[0222] In some embodiments, provided herein are systems comprising (a) a tandem peptide tag comprising (i) a peptide component of a bioluminescent complex fused to (ii) a peptide component of a modified dehalogenase complex; and (b) a tandem polypeptide reporter comprising a polypeptide component of a bioluminescent complex fused to a polypeptide component of a modified dehalogenase complex; wherein the bioluminescent complex and modified dehalogenase complex form upon interaction (facilitated or unfacilitated) of the tandem peptide tag and the tandem polypeptide reporter; wherein the bioluminescent complex is capable of generating bioluminescence in the presence of a substrate (e.g., coelenterazine, furimazine, etc.); and wherein the modified dehalogenase complex is capable of binding to a haloalkane ligand. In some embodiments, a high affinity interaction of one pair of components to form a complex (e.g., components of the bioluminescent complex or components of the modified dehalogenase complex) is sufficient to facilitate formation of the second complex (e.g., modified dehalogenase complex of bioluminescent complex).

### HaloTag

[0223] In some embodiments, provided herein are compositions (e.g., fusion peptides and polypeptides) and systems (e.g., multiple complementary fusion peptides and polypeptides, substrates, ligands, etc.) comprising complementary peptide/polypeptide fragments capable of interacting (e.g., facilitated or unfacilitated) to form an active modified dehalogenase complex capable of forming a covalent bond to a haloalkane ligand. In some embodiments, a first fusion is provided comprising a complementary peptide fragment of a modified dehalogenase, and a second fusion is provided comprising a complementary polypeptide fragment of the modified dehalogenase, wherein upon interacting (e.g., facilitated or unfacilitated), the complementary peptide and polypeptide form an active modified dehalogenase complex capable of forming a covalent bond to a haloalkane ligand. In some embodiments, a first fusion is provided comprising a complementary peptide fragment of a modified dehalogenase, and a complementary polypeptide fragment of the modified dehalogenase is provided (e.g., not as a fusion), wherein upon interacting (e.g., facilitated or unfacilitated), the complementary peptide and polypeptide form an active modified dehalogenase complex capable of forming a covalent bond to a haloalkane ligand. In some embodiments, the complementary peptide and polypeptide are fragments of a split mutant dehalogenase. In alternative embodiments, both fragments may be polypeptides.

[0224] Provided herein, as components of the compositions, systems, and methods herein are split mutated dehalogenases, such as those derived from the commercially available HALOTAG protein (Promega) and/or mutated dehalogenases disclosed in U.S. published application 20060024808, the disclosure of which is incorporated by reference herein.

[0225] Even though these mutant dehalogenases are not technically enzymes (no substrate turnover), the stable binding of a substrate thereto is dependent on proper protein structure. The consequence of re-associating the split fragments of a mutant dehalogenase differs from that of a split enzyme system because the labeling function of a mutant dehalogenase is retained on one of the fragments even after it has separated from its partner, whereas split enzymes are only active when they are brought together and bear no artifact of their prior activity after they are separated. In effect, the labeling reaction of a split mutant dehalogenase provides a molecular memory of a protein interaction. In the case of fluorogenic ligands, the label is retained on one of the fragments, but may not be detectable after complex dissociation (since the fluorogen-activating contacts with the protein may be disrupted/absent); therefore, the combination of split dehalogenase and fluorogenic ligands produce a unique situation of permanent labeling, but with dynamic (on/off) fluorescence detection of the retained label.

[0226] A mutant dehalogenase provides for efficient labeling within a living cell or lysate thereof. This labeling is only conditional on the presence or expression of the protein and the presence of the labeled hydrolase substrate. In contrast, the labeling of a split mutant dehalogenase is dependent on a specific protein interaction occurring within the cell and the presence of the labeled hydrolase substrate.

[0227] In some embodiments, provided as a component of the compositions, systems, and methods herein are split modified dehalogenases. In some embodiments, a first fragment of a mutant dehalogenase is fused to a first fragment of luminescent protein (e.g., and optionally a protein or molecule of interest), and a second fragment of the mutant dehalogenase is fused to a second fragment of the luminescent protein (e.g., and optionally a protein or molecule of interest)). In some embodiments, at least one of the mutant dehalogenase fragments has a substitution that if present in a full-length modified dehalogenase having the sequence of the two fragments, forms a bond with a haloalkane ligand. In some embodiments, the first fragment of the mutant dehalogenase and the second fragment of the mutant dehalogenase are capable of interacting (e.g., facilitated or unfacilitated) to form an active modified dehalogenase complex.

[0228] HALOTAG is a 297-residue self-labeling polypeptide (33 kDa) derived from a bacterial hydrolase (dehalogenase) enzyme, which has been modified to covalently bind to its ligand, a haloalkane moiety. The HALOTAG ligand can be linked to solid surfaces (e.g., beads) or functional groups (e.g., fluorophores), and the HALOTAG polypeptide can be fused to various proteins of interest, allowing covalent attachment of the protein of interest to the solid surface or functional group.

[0229] The HALOTAG polypeptide is a modified dehalogenase with a genetically modified active site, which specifically binds to the haloalkane ligand chloroalkane linker with an enhanced and increased rate of ligand binding (Pries et al. The Journal of Biological Chemistry, 270(18):10405-11; incorporated by reference in its entirety). The reaction that forms the bond between the protein tag and chloroalkane linker is fast and essentially irreversible under physiological conditions (Waugh DS (June 2005). Trends in Biotechnology. 23(6):316-20; incorporated by reference in its entirety). In the natural hydrolase enzyme, nucleophilic attack of the chloroalkane reactive linker causes displacement of the halogen with an amino acid residue, which results in the formation of a covalent alkyl-enzyme intermediate. This intermediate would then be hydrolyzed by an amino acid residue within the wild-type hydrolase (Chen et al. (February 2005) Current Opinion in Biotechnology. 16(1):35-40; incorporated by reference in its entirety). This would lead to regeneration of the enzyme following the reaction. However, with HALOTAG, the modified haloalkane dehalogenase, the reaction intermediate cannot proceed through the second reaction because it cannot be hydrolyzed due to the mutation in the enzyme. This causes the intermediate to persist as a stable covalent adduct with which there is no associated back reaction (Marks et al. (August 2006) Nature Methods. 3 (8): 591-6; incorporated by reference in its entirety).

[0230] HALOTAG fusion proteins can be expressed using standard recombinant protein expression techniques (Adams et al. (May 2002) Journal of the American Chemical Society. 124(21):6063-76; incorporated by reference in its entirety). Since the HALOTAG polypeptide is a relatively small protein, and the reactions are foreign to mammalian cells, there is no interference by endogenous mammalian metabolic reactions (Naested et al. The Plant Journal. 18(5):571-6; incorporated by reference in its entirety). Once the fusion protein has been expressed, there is a wide range of potential areas of experimentation including enzymatic assays, cellular imaging, protein arrays, determination of sub-cellular localization, and many additional possibilities (Janssen DB (April 2004). Current Opinion in Chemical Biology. 8(2):150-9; incorporated by reference in its entirety).

[0231] Various HALOTAG ligands, functional groups, fusions, assays, modifications, uses, etc. are described in U.S. Pat. Nos. 8,748,148; 9,593,316; 10,246,690; 8,742,086; 9,873,866; 10,604,745; U.S. Pat. App. 2009/0253131; U.S. Pat. App. 2010/0273186; 20130337539; U.S. Pat. App. 2012/0258470; U.S. Pat. App. 2012/0252048; U.S. Pat. App. 2011/0201024; U.S. 2014/0322794; each of which is incorporated by reference in their entireties.

[0232] In some embodiments, the fragments, complementary peptides, complementary polypeptides, etc., of a modified dehalogenase described herein are a HALOTAG-based complementation system. In some embodiments, the fragments, complementary peptides, complementary polypeptides, etc., of a modified dehalogenase described herein correspond (e.g., sequence identity, sequence similarity, 3D structure, etc.) to sequences within the HALOTAG protein. In some embodiments, a modified dehalogenase complex herein, comprising two or more peptide or polypeptide components corresponds to a HALOTAG protein and is capable of binding to a halkoalkyl ligand in a similar manner.

[0233] In some embodiments, as described in U.S. Prov. App. No. 63/338,323 and U.S. application Ser. No. 18/312,117, both of which are herein incorporated by reference in their entireties, extensive experiments have been conducted to demonstrate the feasibility of generating fragments of HALOTAG (and variants thereof) capable of interacting to form a modified dehalogenase complex capable of binding to a haloalkyl ligand, as well as optimizing variants of HALOTAG fragments for desired characteristics. As described herein, embodiments are not limited to the HALOTAG sequences. In some embodiments, provided herein are split modified dehalogenases that differ in sequence from HALOTAG (SEQ ID NO: 1).

[0234] In some embodiments, compositions and systems are provided comprising components of a split modified dehalogenase, such as a split HALOTAG (“spHT”) or variants thereof. In some embodiments, systems and compositions herein comprise spHT peptides and polypeptides (e.g., as a portion of the fusions described herein).

[0235] In some embodiments, compositions (e.g., fusions) and systems (e.g., multiple fusions with appropriate ligands and substrates) are provided comprising polypeptides, peptides, fragments, and combinations thereof derived from a modified dehalogenase sequence of SEQ ID NO: 1 (HALOTAG):

MAEIGTGFPFDPHYVEVLGERMHYVDVGPRDGTPVLFLHGNPTSSYVWR
NIIPHVAPTHRCIAPDLIGMGKSDKPDLGYFFDDHVRFMDAFIEALGLE
EVVLVIHDWGSALGFHWAKRNPERVKGIAFMEFIRPIPTWDEWPEFARE
TFQAFRTTDVGRKLIIDQNVFIEGTLPMGVVRPLTEVEMDHYREPFLNP
VDREPLWRFPNELPIAGEPANIVALVEEYMDWLHQSPVPKLLFWGTPGV
LIPPAEAARLAKSLPNCKAVDIGPGLNLLQEDNPDLIGSEIARWLSTLE
ISG.

[0236] In some embodiments, the spHT components herein lack the mutation(s) (e.g., 272 and/or 106) that produce covalent bonding to the haloalkane substrate. Such sp dehalogenases are true enzymes capable of substrate turnover, but otherwise comprising the sequences and characteristics of the embodiments described herein.

[0237] In some embodiments, spHT peptides and polypeptides herein (e.g., as portions of fusions herein, as standalone reporters or tags, etc.) comprise at least 70% sequence identity with a portion of SEQ ID NO: 1 (e.g., >70% sequence identity, >75% sequence identity, >80% sequence identity, >85% sequence identity, >90% sequence identity, >95% sequence identity, >96% sequence identity, >97% sequence identity, >98% sequence identity, >99% sequence identity). In some embodiments, spHT peptides and polypeptides herein (e.g., as portions of fusions herein, as standalone reporters or tags, etc.) comprise 100% sequence identity with all or a portion of SEQ ID NO: 1. In some embodiments, spHT peptides and polypeptides herein (e.g., as portions of fusions herein, as standalone reporters or tags, etc.) comprise at least 70% sequence similarity with all or a portion of SEQ ID NO: 1 (e.g., >70% sequence similarity, >75% sequence similarity, >80% sequence similarity, >85% sequence similarity, >90% sequence similarity, >95% sequence similarity, >96% sequence similarity, >97% sequence similarity, >98% sequence similarity, >99% sequence similarity). In some embodiments, spHT peptides and polypeptides herein (e.g., as portions of fusions herein, as standalone reporters or tags, etc.) comprise 100% sequence similarity with all or a portion of SEQ ID NO: 1.

[0238] In some embodiments, spHT peptides or polypeptides (e.g., as portions of fusions herein, as standalone reporters or tags, etc.) herein comprise an A at a position corresponding to position 2 of SEQ ID NO: 1. In other embodiments, spHT peptides or polypeptides (e.g., as portions of fusions herein, as standalone reporters or tags, etc.) herein comprise an S at a position corresponding to position 2 of SEQ ID NO: 1. In some embodiments, spHT peptides or polypeptides (e.g., as portions of fusions herein, as standalone reporters or tags, etc.) herein comprise a V at a position corresponding to position 47 of SEQ ID NO: 1. In some embodiments, spHT peptides or polypeptides (e.g., as portions of fusions herein, as standalone reporters or tags, etc.) herein comprise a T at a position corresponding to position 58 of SEQ ID NO: 1. In some embodiments, spHT peptides or polypeptides (e.g., as portions of fusions herein, as standalone reporters or tags, etc.) herein comprise a G at a position corresponding to position 78 of SEQ ID NO: 1. In some embodiments, spHT peptides or polypeptides (e.g., as portions of fusions herein, as standalone reporters or tags, etc.) herein comprise a F at a position corresponding to position 88 of SEQ ID NO: 1. In some embodiments, spHT peptides or polypeptides (e.g., as portions of fusions herein, as standalone reporters or tags, etc.) herein comprise a M at a position corresponding to position 89 of SEQ ID NO: 1. In some embodiments, spHT peptides or polypeptides (e.g., as portions of fusions herein, as standalone reporters or tags, etc.) herein comprise a F at a position corresponding to position 128 of SEQ ID NO: 1. In some embodiments, spHT peptides or polypeptides (e.g., as portions of fusions herein, as standalone reporters or tags, etc.) herein comprise a T at a position corresponding to position 155 of SEQ ID NO: 1. In some embodiments, spHT peptides or polypeptides (e.g., as portions of fusions herein, as standalone reporters or tags, etc.) herein comprise a K at a position corresponding to position 160 of SEQ ID NO: 1. In some embodiments, spHT peptides or polypeptides (e.g., as portions of fusions herein, as standalone reporters or tags, etc.) herein comprise a V at a position corresponding to position 167 of SEQ ID NO: 1. In some embodiments, spHT peptides or polypeptides (e.g., as portions of fusions herein, as standalone reporters or tags, etc.) herein comprise a T at a position corresponding to position 172 of SEQ ID NO: 1. In some embodiments, spHT peptides or polypeptides (e.g., as portions of fusions herein, as standalone reporters or tags, etc.) herein comprise a M at a position corresponding to position 175 of SEQ ID NO: 1. In some embodiments, spHT peptides or polypeptides (e.g., as portions of fusions herein, as standalone reporters or tags, etc.) herein comprise a G at a position corresponding to position 176 of SEQ ID NO: 1. In some embodiments, spHT peptides or polypeptides (e.g., as portions of fusions herein, as standalone reporters or tags, etc.) herein comprise a N at a position corresponding to position 195 of SEQ ID NO: 1. In some embodiments, spHT peptides or polypeptides (e.g., as portions of fusions herein, as standalone reporters or tags, etc.) herein comprise a E at a position corresponding to position 224 of SEQ ID NO: 1. In some embodiments, spHT peptides or polypeptides (e.g., as portions of fusions herein, as standalone reporters or tags, etc.) herein comprise a D at a position corresponding to position 227 of SEQ ID NO: 1. In some embodiments, spHT peptides or polypeptides (e.g., as portions of fusions herein, as standalone reporters or tags, etc.) herein comprise a K at a position corresponding to position 257 of SEQ ID NO: 1. In some embodiments, spHT peptides or polypeptides (e.g., as portions of fusions herein, as standalone reporters or tags, etc.) herein comprise an A at a position corresponding to position 264 of SEQ ID NO: 1. In some embodiments, peptides or polypeptides herein comprise a N at a position corresponding to position 272 of SEQ ID NO: 1. In some embodiments, spHT peptides or polypeptides (e.g., as portions of fusions herein, as standalone reporters or tags, etc.) herein comprise a L at a position corresponding to position 273 of SEQ ID NO: 1. In some embodiments, spHT peptides or polypeptides (e.g., as portions of fusions herein, as standalone reporters or tags, etc.) herein comprise a S at a position corresponding to position 291 of SEQ ID NO: 1. In some embodiments, spHT peptides or polypeptides (e.g., as portions of fusions herein, as standalone reporters or tags, etc.) herein comprise a T at a position corresponding to position 292 of SEQ ID NO: 1. In some embodiments, spHT peptides or polypeptides (e.g., as portions of fusions herein, as standalone reporters or tags, etc.) herein comprise a E at a position corresponding to position 294 of SEQ ID NO: 1. In some embodiments, spHT peptides or polypeptides (e.g., as portions of fusions herein, as standalone reporters or tags, etc.) herein comprise a I at a position corresponding to position 295 of SEQ ID NO: 1. In some embodiments, spHT peptides or polypeptides (e.g., as portions of fusions herein, as standalone reporters or tags, etc.) herein comprise a S at a position corresponding to position 296 of SEQ ID NO: 1. In some embodiments, spHT peptides or polypeptides (e.g., as portions of fusions herein, as standalone reporters or tags, etc.) herein comprise a G at a position corresponding to position 297 of SEQ ID NO: 1.

[0239] In some embodiments, spHT peptides or polypeptides (e.g., as portions of fusions herein, as standalone reporters or tags, etc.) herein do not have an S at a position corresponding to position 2 of SEQ ID NO: 1. In some embodiments, spHT peptides or polypeptides (e.g., as portions of fusions herein, as standalone reporters or tags, etc.) herein do not have a L at a position corresponding to position 47 of SEQ ID NO: 1. In some embodiments, spHT peptides or polypeptides (e.g., as portions of fusions herein, as standalone reporters or tags, etc.) herein do not have a S at a position corresponding to position 58 of SEQ ID NO: 1. In some embodiments, spHT peptides or polypeptides (e.g., as portions of fusions herein, as standalone reporters or tags, etc.) herein do not have a D at a position corresponding to position 78 of SEQ ID NO: 1. In some embodiments, spHT peptides or polypeptides (e.g., as portions of fusions herein, as standalone reporters or tags, etc.) herein do not have a Y at a position corresponding to position 88 of SEQ ID NO: 1. In some embodiments, spHT peptides or polypeptides (e.g., as portions of fusions herein, as standalone reporters or tags, etc.) herein do not have a L at a position corresponding to position 89 of SEQ ID NO: 1. In some embodiments, spHT peptides or polypeptides (e.g., as portions of fusions herein, as standalone reporters or tags, etc.) herein do not have a C at a position corresponding to position 128 of SEQ ID NO: 1. In some embodiments, spHT peptides or polypeptides (e.g., as portions of fusions herein, as standalone reporters or tags, etc.) herein do not have an A at a position corresponding to position 155 of SEQ ID NO: 1. In some embodiments, spHT peptides or polypeptides (e.g., as portions of fusions herein, as standalone reporters or tags, etc.) herein do not have a E at a position corresponding to position 160 of SEQ ID NO: 1. In some embodiments, spHT peptides or polypeptides (e.g., as portions of fusions herein, as standalone reporters or tags, etc.) herein do not have an A at a position corresponding to position 167 of SEQ ID NO: 1. In some embodiments, spHT peptides or polypeptides (e.g., as portions of fusions herein, as standalone reporters or tags, etc.) herein do not have an A at a position corresponding to position 172 of SEQ ID NO: 1. In some embodiments, spHT peptides or polypeptides (e.g., as portions of fusions herein, as standalone reporters or tags, etc.) herein do not have a K at a position corresponding to position 175 of SEQ ID NO: 1. In some embodiments, spHT peptides or polypeptides (e.g., as portions of fusions herein, as standalone reporters or tags, etc.) herein do not have a C at a position corresponding to position 176 of SEQ ID NO: 1. In some embodiments, spHT peptides or polypeptides (e.g., as portions of fusions herein, as standalone reporters or tags, etc.) herein do not have a K at a position corresponding to position 195 of SEQ ID NO: 1. In some embodiments, spHT peptides or polypeptides (e.g., as portions of fusions herein, as standalone reporters or tags, etc.) herein do not have an A at a position corresponding to position 224 of SEQ ID NO: 1. In some embodiments, spHT peptides or polypeptides (e.g., as portions of fusions herein, as standalone reporters or tags, etc.) herein do not have a N at a position corresponding to position 227 of SEQ ID NO: 1. In some embodiments, spHT peptides or polypeptides (e.g., as portions of fusions herein, as standalone reporters or tags, etc.) herein do not have a E at a position corresponding to position 257 of SEQ ID NO: 1. In some embodiments, spHT peptides or polypeptides (e.g., as portions of fusions herein, as standalone reporters or tags, etc.) herein do not have a T at a position corresponding to position 264 of SEQ ID NO: 1. In some embodiments, spHT peptides or polypeptides (e.g., as portions of fusions herein, as standalone reporters or tags, etc.) herein do not have a H at a position corresponding to position 272 of SEQ ID NO: 1. In some embodiments, spHT peptides or polypeptides (e.g., as portions of fusions herein, as standalone reporters or tags, etc.) herein do not have a Y at a position corresponding to position 273 of SEQ ID NO: 1. In some embodiments, spHT peptides or polypeptides (e.g., as portions of fusions herein, as standalone reporters or tags, etc.) herein do not have a P at a position corresponding to position 291 of SEQ ID NO: 1. In some embodiments, spHT peptides or polypeptides (e.g., as portions of fusions herein, as standalone reporters or tags, etc.) herein do not have an A at a position corresponding to position 292 of SEQ ID NO: 1. In some embodiments, spHT peptides or polypeptides (e.g., as portions of fusions herein, as standalone reporters or tags, etc.) herein do not have an amino acid at a position corresponding to position 294 of SEQ ID NO: 1. In some embodiments, spHT peptides or polypeptides (e.g., as portions of fusions herein, as standalone reporters or tags, etc.) herein do not have an amino acid at a position corresponding to position 295 of SEQ ID NO: 1.

[0240] In some embodiments, spHT peptides or polypeptides (e.g., as portions of fusions herein, as standalone reporters or tags, etc.) herein do not have an amino acid at a position corresponding to position 296 of SEQ ID NO: 1. In some embodiments, spHT peptides or polypeptides (e.g., as portions of fusions herein, as standalone reporters or tags, etc.) herein do not have an amino acid at a position corresponding to position 297 of SEQ ID NO: 1.

[0241] In some embodiments, a sp dehalogenase (e.g., spHT) comprises two peptide and/or polypeptide components that collectively comprise at least 70% sequence similarity or identity with all or a portion of SEQ ID NO: 1 (e.g., >70% sequence similarity or identity, >75% sequence similarity or identity, >80% sequence similarity or identity, >85% sequence similarity or identity, >90% sequence similarity or identity, >95% sequence similarity or identity, >96% sequence similarity or identity, >97% sequence similarity or identity, >98% sequence similarity or identity, >99% sequence similarity or identity). For example, the first peptide/polypeptide component of the sp polypeptide corresponds to a first portion of SEQ ID NO: 1 (e.g., at least 70% sequence similarity or identity to the first portion), and the second peptide/polypeptide component of the sp polypeptide corresponds to a second portion of SEQ ID NO: 1 (e.g., at least 70% sequence similarity or identity to the second portion). In some embodiments, a sp dehalogenase (e.g., spHT) comprises two fragments that collectively comprise 100% sequence similarity or identity with all or a portion of SEQ ID NO: 1. For example, the first fragment of the sp polypeptide has 100% sequence similarity or identity to a first portion of SEQ ID NO: 1, and the second fragment of the sp polypeptide has 100% sequence similarity or identity to a second portion SEQ ID NO: 1.

[0242] In some embodiments, a sp dehalogenase (e.g., present as a portion of a fusion herein, present as standalone reporter or tag, etc.) comprises a sp site. The sp site is an internal location in the parent sequence that defines the C-terminus of the first component or fragment and the N-terminus of the second component or fragment of the sp dehalogenase. For example, if a theoretical a 100 amino acid polypeptide were split with a sp site between residues 57 and 58 of the parent polypeptide (referred to herein as a sp site of 57), the first component polypeptide would correspond to positions 1-57, and the second component polypeptide would correspond to positions 58-100. In some embodiments herein, a sp site within SEQ ID NO: 1 may occur at any position from position 5 of SEQ ID NO:1 to position 290 of SEQ ID NO: 1. In some embodiments, SEQ ID NOS: 2-577 are exemplary components of spHT polypeptides having 100% sequence identity to SEQ ID NO: 1. In some embodiments, an active spHT complex is formed between two fragments that collectively comprise amino acids corresponding to each position in SEQ ID NO: 1. For example, a polypeptide having a sequence of SEQ ID NO: 26 and a peptide having a sequence of SEQ ID NO: 27 collectively comprise amino acids corresponding to each position in SEQ ID NO: 1. Any pairs of peptide and polypeptides (or two polypeptides) corresponding to two of SEQ ID NOS: 2-577 and together comprising amino acids corresponding to each position in SEQ ID NO: 1 (with or without deletion or duplication of positions) find use in embodiments herein. In some embodiments, a spHT dehalogenase (e.g., for use in the fusions herein or as a standalone reporter or tag) comprises any of the following pairs of fragments: SEQ ID NOS: 2 and 3, 4 and 5, 6 and 7, 8 and 9, 10 and 11, 12 and 13, 14 and 15, 16 and 17, 18 and 19, 20 and 21, 22 and 23, 24 and 25, 26 and 27, 28 and 29, 30 and 31, 32 and 33, 34 and 35, 36 and 37, 38 and 39, 40 and 41, 42 and 43, 44 and 45, 46 and 47, 48 and 49, 50 and 51, 52 and 53, 54 and 55, 56 and 57, 58 and 59, 60 and 61, 62 and 63, 64 and 65, 66 and 67, 68 and 69, 70 and 71, 72 and 73, 74 and 75, 76 and 77, 78 and 79, 80 and 81, 82 and 83, 84 and 85, 86 and 87, 88 and 89, 90 and 91, 92 and 93, 94 and 95, 96 and 97, 98 and 99, 100 and 101, 102 and 103, 104 and 105, 106 and 107, 108 and 109, 110 and 111, 112 and 113, 114 and 115, 116 and 117, 118 and 119, 120 and 121, 121, 122 and 123, 124 and 125, 126 and 127, 128 and 129, 130 and 131, 132 and 133, 134 and 135, 136 and 137, 138 and 139, 140 and 141, 142 and 143, 144 and 145, 146 and 147, 148 and 149, 150 and 151, 152 and 153, 154 and 155, 156 and 157, 158 and 159, 160 and 161, 172 and 173, 174 and 175, 176 and 177, 178 and 179, 180 and 181, 182 and 183, 184 and 185, 186 and 187, 188 and 189, 190 and 191, 192 and 193, 194 and 195, 196 and 197, 198 and 199, 200 and 201, 202 and 203, 204 and 205, 206 and 207, 208 and 209, 190 and 211, 212 and 213, 214 and 215, 216 and 217, 218 and 219, 220 and 221, 222 and 223, 224 and 225, 226 and 227, 228 and 229, 300 and 301, 302 and 303, 304 and 305, 306 and 307, 308 and 309, 310 and 311, 312 and 313, 314 and 315, 316 and 317, 318 and 319, 320 and 321, 322 and 323, 324 and 325, 326 and 327, 328 and 329, 330 and 331, 332 and 333, 334 and 335, 336 and 337, 338 and 339, 340 and 341, 342 and 343, 344 and 345, 346 and 347, 348 and 349, 350 and 351, 352 and 353, 354 and 355, 356 and 357, 358 and 359, 360 and 361, 362 and 363, 364 and 365, 366 and 367, 368 and 369, 370 and 371, 372 and 373, 374 and 375, 376 and 377, 378 and 379, 380 and 381, 382 and 383, 384 and 385, 386 and 387, 388 and 389, 390 and 391, 392 and 393, 394 and 395, 396 and 397, 398 and 399, 400 and 401, 402 and 403, 404 and 405, 406 and 407, 408 and 409, 410 and 411, 412 and 413, 414 and 415, 416 and 417, 418 and 419, 420 and 421, 422 and 423, 424 and 425, 426 and 427, 428 and 429, 430 and 431, 432 and 433, 434 and 435, 436 and 437, 438 and 439, 440 and 441, 442 and 443, 444 and 445, 446 and 447, 448 and 449, 450 and 451, 452 and 453, 454 and 455, 456 and 457, 458 and 459, 460 and 461, 462 and 463, 464 and 465, 466 and 467, 468 and 469, 470 and 471, 472 and 473, 474 and 475, 476 and 477, 478 and 479, 480 and 481, 482 and 483, 484 and 485, 486 and 487, 488 and 489, 490 and 491, 492 and 493, 494 and 495, 496 and 497, 498 and 499, 500 and 501, 502 and 503, 504 and 505, 506 and 507, 508 and 509, 510 and 511, 512 and 513, 514 and 515, 516 and 517, 518 and 519, 520 and 521, 522 and 523, 524 and 525, 526 and 527, 528 and 529, 530 and 531, 532 and 533, 534 and 535, 536 and 537, 538 and 539, 540 and 541, 542 and 543, 544 and 545, 546 and 547, 548 and 549, 550 and 551, 552 and 553, 554 and 555, 556 and 557, 558 and 559, 560 and 561, 562 and 563, 564 and 565, 566 and 567, 568 and 569, 570 and 571, 572 and 573, 574 and 575, and 576 and 577.

[0243] In some embodiments, a spHT comprises a peptide and polypeptide (or two polypeptides) pair corresponding to two of SEQ ID NOS: 2-577 together comprising amino acids corresponding to each position in SEQ ID NO: 1, but with a deletion of up to 40 amino acids in length (e.g., 1, 2, 3, 4, 5, 6, 7, 8, 9, 10, 15, 20, 25, 30, 35, 40, or ranges therebetween) at the C-terminus or N-terminus of one or both of fragments. For example, a pair corresponding to SEQ ID NOS: 7 and 28 together correspond to positions of SEQ ID NO: 1, but with an 11-residue deletion. In some embodiments, any pairs of SEQ ID NOS: 2-577, together corresponding to the sequence of SEQ ID NO: 1, but with deletions of up to 40 amino acids, are within the scope of spHTs herein. In some embodiments, the deletion is adjacent to the split site. In some embodiments, the deletion corresponds to the N- or C-terminus of SEQ ID NO: 1.

[0244] In some embodiments, a spHT comprises a peptide and polypeptide (or two polypeptides) pair corresponding to two of SEQ ID NOS: 2-577 together comprising amino acids corresponding to each position in SEQ ID NO: 1, but with a duplication of up to 40 amino acids in length (e.g., 1, 2, 3, 4, 5, 6, 7, 8, 9, 10, 15, 20, 25, 30, 35, 40, or ranges therebetween) at the C-terminus or N-terminus of one or both of fragments. For example, a pair corresponding to SEQ ID NOS: 6 and 29 together correspond to positions of SEQ ID NO: 1, but with an 11 residue duplication. In some embodiments, any pairs of SEQ ID NOS: 2-577, together corresponding to the sequence of SEQ ID NO: 1, but with duplications of up to 40 amino acids, are within the scope of spHTs herein. In some embodiments, the duplication is adjacent to the split site. In some embodiments, the duplication corresponds to the N- or C-terminus of SEQ ID NO: 1.

[0245] Fragments utilizing any sp sites, for example, corresponding to a position between position 5 and position 290 of SEQ ID NO: 1, are readily envisioned and within the scope herein.

[0246] In some embodiments, spHTs are provided with a sp site corresponding to position 5, 6, 7, 8, 9, 10, 11, 12, 13, 14, 15, 16, 17, 18, 19, 31, 21, 22, 23, 24, 25, 26, 27, 28, 29, 30, 31, 32, 33, 34, 35, 36, 37, 38, 39, 40, 41, 42, 43, 44, 45, 46, 47, 48, 49, 50, 51, 52, 53, 54, 55, 56, 57, 58, 59, 60, 61, 62, 63, 64, 65, 66, 67, 68, 69, 70, 71, 72, 73, 74, 75, 76, 77, 78, 79, 80, 81, 82, 83, 84, 85, 86, 87, 88, 89, 90, 91, 92, 93, 94, 95, 96, 97, 98, 99, 100, 101, 102, 313, 104, 105, 106, 107, 108, 109, 110, 111, 112, 113, 114, 115, 116, 117, 118, 119, 120, 121, 122, 123, 124, 125, 126, 127, 128, 129, 130, 131, 132, 133, 134, 135, 136, 137, 138, 139, 140, 141, 142, 143, 144, 145, 146, 147, 148, 149, 150, 151, 152, 153, 154, 155, 156, 157, 158, 159, 160, 161, 162, 163, 164, 165, 166, 167, 168, 169, 170, 171, 172, 173, 174, 175, 176, 177, 178, 179, 180, 181, 182, 183, 184, 185, 186, 187, 188, 189, 190, 191, 192, 193, 194, 195, 196, 197, 198, 199, 310, 311, 312, 313, 314, 315, 316, 317, 318, 319, 210, 211, 212, 213, 214, 215, 216, 217, 218, 219, 220, 221, 222, 223, 224, 225, 226, 227, 228, 229, 230, 231, 232, 233, 234, 235, 236, 237, 238, 239, 240, 241, 242, 243, 244, 245, 246, 247, 248, 249, 250, 251, 252, 253, 254, 255, 256, 257, 258, 259, 260, 261, 262, 263, 264, 265, 266, 267, 268, 269, 270, 271, 272, 273, 274, 275, 276, 277, 278, 279, 280, 281, 282, 283, 284, 285, 286, 287, 288, 289, or 290 of SEQ ID NO: 1.

[0247] In some embodiments, spHTs are provided with a sp site corresponding to a position between positions 5 and 13, 36 and 51, 63 and 72, 84 and 92, 104 and 130, 142 and 148, 160 and 174, 186 and 189, 311 and 313, 221 and 229, or 269 and 290 of SEQ ID NO: 1.

[0248] In some embodiments, the spHT peptides and polypeptides herein (e.g., of the fusions herein or as standalone reporters or tags) comprise one or more (e.g., 2, 3, 4, 5, 6, 7, 8, 9 10, 11, 12, 13, 14, 15, 16, 17, 18, 19, 20, 25, 30, 35, 40, 50, 75, or more) substitutions or deletions relative to one of SEQ ID NOS: 2-557. In some embodiments, sp peptides and polypeptides are provided (e.g., within the fusions herein or as standalone reporters or tags) having 70%-100% sequence identity to one of SEQ ID NOS: 2-557 (e.g., >70% sequence identity, >75% sequence identity, >80% sequence identity, >85% sequence identity, >90% sequence identity, >95% sequence identity, >96% sequence identity, >97% sequence identity, >98% sequence identity, >99% sequence identity). In some embodiments, sp peptides and polypeptides are provided having 70%-100% sequence similarity to one of SEQ ID NOS: 2-557 (e.g., >70% sequence similarity, >75% sequence similarity, >80% sequence similarity, >85% sequence similarity, >90% sequence similarity, >95% sequence similarity, >96% sequence similarity, >97% sequence similarity, >98% sequence similarity, >99% sequence similarity).

[0249] In some embodiments, pairs of sp peptides and/or polypeptides are provided (e.g., within the fusions herein or as standalone reporters or tags) that are capable of forming active sp dehalogenase complexes (active spHT complexes). In some embodiments, such pairs comprise at least 70% sequence identity or similarity to two of SEQ ID NOS: 2-557, and together comprise residues corresponding to 100% of the positions in SEQ ID NO: 1, allowing for up to 40 deletions or duplications at the C- or N-terminus of the peptides/polypeptides.

[0250] In some embodiments, the first fragment of a spHT complementary pair corresponds to position 1 through position 5, 6, 7, 8, 9, 10, 11, 12, 13, 14, 15, 16, 17, 18, 19, 31, 21, 22, 23, 24, 25, 26, 27, 28, 29, 30, 31, 32, 33, 34, 35, 36, 37, 38, 39, 40, 41, 42, 43, 44, 45, 46, 47, 48, 49, 50, 51, 52, 53, 54, 55, 56, 57, 58, 59, 60, 61, 62, 63, 64, 65, 66, 67, 68, 69, 70, 71, 72, 73, 74, 75, 76, 77, 78, 79, 80, 81, 82, 83, 84, 85, 86, 87, 88, 89, 90, 91, 92, 93, 94, 95, 96, 97, 98, 99, 100, 101, 102, 313, 104, 105, 106, 107, 108, 109, 110, 111, 112, 113, 114, 115, 116, 117, 118, 119, 120, 121, 122, 123, 124, 125, 126, 127, 128, 129, 130, 131, 132, 133, 134, 135, 136, 137, 138, 139, 140, 141, 142, 143, 144, 145, 146, 147, 148, 149, 150, 151, 152, 153, 154, 155, 156, 157, 158, 159, 160, 161, 162, 163, 164, 165, 166, 167, 168, 169, 170, 171, 172, 173, 174, 175, 176, 177, 178, 179, 180, 181, 182, 183, 184, 185, 186, 187, 188, 189, 190, 191, 192, 193, 194, 195, 196, 197, 198, 199, 310, 311, 312, 313, 314, 315, 316, 317, 318, 319, 210, 211, 212, 213, 214, 215, 216, 217, 218, 219, 220, 221, 222, 223, 224, 225, 226, 227, 228, 229, 230, 231, 232, 233, 234, 235, 236, 237, 238, 239, 240, 241, 242, 243, 244, 245, 246, 247, 248, 249, 250, 251, 252, 253, 254, 255, 256, 257, 258, 259, 260, 261, 262, 263, 264, 265, 266, 267, 268, 269, 270, 271, 272, 273, 274, 275, 276, 277, 278, 279, 280, 281, 282, 283, 284, 285, 286, 287, 288, 289, or 290 of SEQ ID NO: 1.

[0251] In some embodiments, the second fragment of a spHT complementary pair corresponds to position 7, 8, 9, 10, 11, 12, 13, 14, 15, 16, 17, 18, 19, 31, 21, 22, 23, 24, 25, 26, 27, 28, 29, 30, 31, 32, 33, 34, 35, 36, 37, 38, 39, 40, 41, 42, 43, 44, 45, 46, 47, 48, 49, 50, 51, 52, 53, 54, 55, 56, 57, 58, 59, 60, 61, 62, 63, 64, 65, 66, 67, 68, 69, 70, 71, 72, 73, 74, 75, 76, 77, 78, 79, 80, 81, 82, 83, 84, 85, 86, 87, 88, 89, 90, 91, 92, 93, 94, 95, 96, 97, 98, 99, 100, 101, 102, 313, 104, 105, 106, 107, 108, 109, 110, 111, 112, 113, 114, 115, 116, 117, 118, 119, 120, 121, 122, 123, 124, 125, 126, 127, 128, 129, 130, 131, 132, 133, 134, 135, 136, 137, 138, 139, 140, 141, 142, 143, 144, 145, 146, 147, 148, 149, 150, 151, 152, 153, 154, 155, 156, 157, 158, 159, 160, 161, 162, 163, 164, 165, 166, 167, 168, 169, 170, 171, 172, 173, 174, 175, 176, 177, 178, 179, 180, 181, 182, 183, 184, 185, 186, 187, 188, 189, 190, 191, 192, 193, 194, 195, 196, 197, 198, 199, 310, 311, 312, 313, 314, 315, 316, 317, 318, 319, 210, 211, 212, 213, 214, 215, 216, 217, 218, 219, 220, 221, 222, 223, 224, 225, 226, 227, 228, 229, 230, 231, 232, 233, 234, 235, 236, 237, 238, 239, 240, 241, 242, 243, 244, 245, 246, 247, 248, 249, 250, 251, 252, 253, 254, 255, 256, 257, 258, 259, 260, 261, 262, 263, 264, 265, 266, 267, 268, 269, 270, 271, 272, 273, 274, 275, 276, 277, 278, 279, 280, 281, 282, 283, 284, 285, 286, 287, 288, 289, or 290 through position 294 of SEQ ID NO: 1.

[0252] In some embodiments, the duplicated portion of a spHT complementary pair is 1-40 amino acids in length (e.g., 1, 2, 3, 4, 5, 6, 7, 8, 9, 10, 11, 12, 13, 14, 15, 16, 17, 18, 19, 31, 21, 22, 23, 24, 25, 26, 27, 28, 29, 30, 31, 32, 33, 34, 35, 36, 37, 38, 39, 40, or ranges therebetween).

[0253] In some embodiments, the deleted portion of a spHTs complementary pair is 1-40 amino acids in length (e.g., 1, 2, 3, 4, 5, 6, 7, 8, 9, 10, 11, 12, 13, 14, 15, 16, 17, 18, 19, 31, 21, 22, 23, 24, 25, 26, 27, 28, 29, 30, 31, 32, 33, 34, 35, 36, 37, 38, 39, 40, or ranges therebetween).

[0254] The exemplary spHT fragment sequences of SEQ ID NOS: 2-577 comprise 100% sequence identity to portions of SEQ ID NO: 1; there are no portions of these sequences that do not align with 100% sequence identity to SEQ ID NO: 1. However, as described herein, spHT peptides and polypeptides may have less than 100% sequence identity with SEQ ID NO: 1 (e.g., >70%, >75%, >80%, >85%, >90%, >95%, >96%, >97%, >98%, >99%, but less than 100% sequence identity). Therefore, peptides and polypeptide having less than 100% sequence identity with one or SEQ ID NOS: 2-577 (e.g., >70%, >75%, >80%, >85%, >90%, >95%, >96%, >97%, >98%, >99%, but less than 100% sequence identity) are provided herein and find use in the complementary pairs and complexes herein.

[0255] In some embodiments, a spHT complementary pair herein comprises a peptide corresponding to SEQ ID NO: 578 and a polypeptide corresponding to SEQ ID NO: 1188. SEQ NOS: 578 and 1188 are fragments of SEQ ID NO: 1 and have 100% sequence identity to portions of SEQ ID NO: 1. In some embodiments, a spHT complementary pair comprises a peptide having 100% sequence identity to SEQ ID NO: 578; such a peptide is referred to herein as “SmHT.” In some embodiments, a spHT complementary pair comprises a polypeptide having 100% sequence identity to SEQ ID NO: 1188; such a polypeptide is referred to herein as “LgHT.” Extensive experiments were conducted during development of embodiments herein to analyze variants of SmHT and LgHT. SEQ ID NOS: 579-1187 correspond to peptide variants having at least one and up to all positions of SEQ ID NO: 588 substituted. A peptide of each of SEQ ID NOS: 578-1187 was synthesized and tested for various characteristics, including the ability to form an active complex with a complementary LgHT variant polypeptide. SEQ ID NOS: 1189-3033 correspond to polypeptide variants having one or more substitutions relative to SEQ ID NO: 1188. A polypeptide of each of SEQ ID NOS: 1188-3033 was synthesized and tested for various characteristics, including the ability to form an active complex with a complementary SmHT variant peptide.

[0256] In some embodiments, provided herein are variant SmHT peptides having one or more substitutions relative to a reference SmHT peptide sequence, for example, peptides of SEQ ID NOS: 3061, 3064-3066, and 3079-3091.

[0257] In some embodiments, provided herein (e.g., within a fusion herein or as a standalone reporter or tag, etc.) is a SmHT peptide or SmHT variant peptide having at least 70% (e.g., 70%, 75%, 80%, 85%, 90%, 95%, 100%, or ranges therebetween) sequence similarity (e.g., conservative or semi-conservative similarity) with one of SEQ ID NOS: 578-1187, 3061, 3064-3066, and 3079-3091. In some embodiments, a peptide (e.g., within a fusion herein or as a standalone reporter or tag, etc.) corresponds to SmHT (SEQ ID NO: 578), but with one or more (e.g., 2, 3, 4, 5, 6, 7, 8, 9, 10, 11, 12, 13, 14, 15, 16, 17, or ranges therebetween) of the substitutions of one or more of SEQ ID NOS: 588-1187 relative to SEQ ID NO: 578. In some embodiments, a SmHT variant (e.g., within a fusion herein or as a standalone reporter or tag, etc.) has 1-8 (e.g., 1, 2, 3, 4, 5, 6, 7, 8, or ranges therebetween) non-conservative substitutions relative to one of SEQ ID NOS: 578-1187.

[0258] In some embodiments, a peptide component of a modified dehalogenase (e.g., within a fusion herein or as a standalone reporter or tag, etc.) corresponds to HT[3-19] (SEQ ID NO: 3061), or a variant with one or more (e.g., 2, 3, 4, 5, 6, 7, 8, 9, 10, 11, 12, 13, 14, 15, 16, 17, or ranges therebetween) of the substitutions of one or more of SEQ ID NOS: 3061, 3064-3066, and 3079-3091 relative to SEQ ID NO: 3061. In some embodiments, a HT[3-19] variant (e.g., within a fusion herein or as a standalone reporter or tag, etc.) has 1-8 (e.g., 1, 2, 3, 4, 5, 6, 7, 8, or ranges therebetween) non-conservative substitutions relative to one of SEQ ID NOS: 3061, 3064-3066, and 3079-3091.

[0259] In some embodiments, provided herein (e.g., within a fusion herein or as a standalone reporter or tag, etc.) is a SmHT peptide or SmHT variant peptide comprising:

(SEQ ID NO: 3034)
X₁X₂X₃X₄X₅(F/W/Y/M/H)X₇(F/W/Y/D/R)X₉X₁₀X₁₁(F/W/Y/M/H/
R)(V/I/L/M/A/C)X₁₄(V/I/L/A/C/MI/L/F/W)X₁₆X₁₇;
and/or
(SEQ ID NO: 3035)
X₁X₂X₃X₄X₅(F/W/Y)X₇(F/W/Y)X₉X₁₀X₁₁(F/W/Y)(V/I/L/M)X₁₄
(V/I/L X₁₆X₁₇;

wherein each X is any amino acid (e.g., proteinogenic amino acid).

[0260] In some embodiments, provided herein is a LgHT polypeptide or LgHT variant polypeptide (e.g., within a fusion herein or as a standalone reporter or tag, etc.) having at least 70% (e.g., 70%, 75%, 80%, 85%, 90%, 95%, 100%, or ranges therebetween) sequence similarity (e.g., conservative or semi-conservative similarity) with one of SEQ ID NOS: 1188-3033. In some embodiments, a polypeptide (e.g., within a fusion herein or as a standalone reporter or tag, etc.) corresponds to LgHT (SEQ ID NO: 1188), but with one or more (e.g., 2, 3, 4, 5, 6, 7, 8, 9, 10, 11, 12, 13, 14, 15, 16, 17, 18, 19, 20, 25, 30, or more, or ranges therebetween) of the substitutions of one or more of SEQ ID NOS: 1189-3033 relative to SEQ ID NO: 1188. In some embodiments, a LgHT variant (e.g., within a fusion herein or as a standalone reporter or tag, etc.) has at least 70% (e.g., 70%, 75%, 80%, 85%, 90%, 95%, 100%, or ranges therebetween) sequence identity with one of SEQ ID NOS: 1188-3033. In some embodiments, a LgHT polypeptide of LgHT variant polypeptide comprises a substitution relative to a reference LgHT sequence (SEQ ID NO: 1188) corresponding to a substitution present in the LgHT portion of a construct of one or SEQ ID NOS: 3110-4064.

[0261] In some embodiments, provided herein is a spHT complementary pair (e.g., each component of the pair present within a separate fusion) comprising (a) a SmHT peptide or SmHT variant peptide having (1) at least 70% (e.g., 70%, 75%, 80%, 85%, 90%, 95%, 100%, or ranges therebetween) sequence similarity (e.g., conservative or semi-conservative similarity) with one of SEQ ID NOS: 578-1187, 3061, 3064-3066, and 3079-3091, (2) one or more (e.g., 2, 3, 4, 5, 6, 7, 8, 9, 10, 11, 12, 13, 14, 15, 16, 17, or ranges therebetween) substitutions relative to SEQ ID NO: 578, and/or (3) 1-8 (e.g., 1, 2, 3, 4, 5, 6, 7, 8, or ranges therebetween) non-conservative substitutions relative to one of SEQ ID NOS: 578-1187, 3061, 3064-3066, and 3079-3091; and (b) a LgHT polypeptide or LgHT variant polypeptide having (1) at least 70% (e.g., 70%, 75%, 80%, 85%, 90%, 95%, 100%, or ranges therebetween) sequence similarity (e.g., conservative or semi-conservative similarity) with one of SEQ ID NOS: 1188-3033, (2) one or more (e.g., 2, 3, 4, 5, 6, 7, 8, 9, 10, 11, 12, 13, 14, 15, 16, 17, 18, 19, 20, 25, 30, or more, or ranges therebetween) substitutions relative to SEQ ID NO: 1188, and/or (3) at least 70% (e.g., 70%, 75%, 80%, 85%, 90%, 95%, 100%, or ranges therebetween) sequence identity with one of SEQ ID NOS: 1188-3033.

[0262] The formation of a spHT complex from two complementary fragments may be reversible or irreversible. In some embodiments, a spHT complex is capable of being denatured, renatured, and having its activity reconstituted. In some embodiments, such spHTs find use in methods that comprise exposing samples containing the spHTs to denaturing conditions (e.g., manufacturing conditions, storage conditions, etc.) prior to substrate binding.

### NanoLuc

[0263] In some embodiments, provided herein are compositions (e.g., fusion peptides and polypeptides) and systems (e.g., multiple complementary fusion peptides and polypeptides, substrates, ligands, etc.) comprising peptide/polypeptide fragments capable of interacting (e.g., facilitated or unfacilitated) to form an active luminescent protein capable of utilizing an appropriate substrate to generate luminescence.

[0264] In some embodiments, provided herein are compositions (e.g., fusion peptides and polypeptides) and systems (e.g., multiple complementary fusion peptides and polypeptides, substrates, ligands, etc.) comprising complementary peptide/polypeptide fragments capable of interacting (e.g., facilitated or unfacilitated) to form an active bioluminescent complex capable of generating luminescence upon interaction with an appropriate luminescent substrate. In some embodiments, a first fusion is provided comprising a complementary peptide fragment of a luminescent protein, and a second fusion is provided comprising a complementary polypeptide fragment of the luminescent protein, wherein upon interacting (e.g., facilitated or unfacilitated), the complementary peptide and polypeptide form an active bioluminescent complex capable of generating luminescence upon interaction with an appropriate luminescent substrate. In some embodiments, the complementary peptide and polypeptide are fragments of a split luminescent protein (e.g., luciferase). In alternative embodiments, both fragments may be polypeptides.

[0265] Provided herein, as components of the compositions, systems, and methods herein are bipartite or multipartite bioluminescent complexes, such as those derived from the commercially available NANOLUC protein (Promega), and/or the NANOBIT (Promega) or NANOTRIP structural complementation systems.

[0266] The native Oplophorus gracilirostris luciferase (OgLuc) and commercially-available NANOLUC luciferase (Promega Corporation) each comprise polypeptides of 10 β (beta) strands (β1, β2, β3, β4, β5, β6, β7, β8, β9, β10). U.S. Pat. No. 9,797,889 (herein incorporated by reference in its entirety) describes development and use of a complementation system comprising a β1-9-like polypeptide and a β10-like peptide (certain OgLuc/NANOLUC-based polypeptide and peptide sequences in polypeptide and peptide sequences in U.S. Pat. No. 9,797,889 differ from the corresponding sequences in NANOLUC and wild-type native OgLuc). Similarly, U.S. application Ser. No. 16/439,565 (herein incorporated by reference in its entirety) describes the development and use of a complementation systems comprising two or more OgLuc/NANOLUC peptides and/or polypeptides (certain OgLuc/NANOLUC-based polypeptide and peptide sequences in U.S. patent Ser. No. 16/439,565 differ from the corresponding sequences in NANOLUC and wild-type native OgLuc).

[0267] In some embodiments, provided herein is a peptide component of a binary bioluminescent complex (e.g., within a fusion herein or as a standalone reporter or tag, etc.) having greater than 40% (e.g., >40%, >45%, >50%, >55%, >60%, >65%, >70%, >75%, >80%, >85%, >90%, >95%, >98%, >99%, 100%) sequence identity with SEQ ID NO: 3036, wherein a detectable bioluminescent signal is produced when the peptide component of a binary bioluminescent complex contacts a polypeptide consisting of SEQ ID NO: 3037 (e.g., within a fusion herein or as a standalone reporter or tag, etc.) in the presence of a substrate for the bioluminescent complex (e.g., greater luminescence that the components of the complex in the presence of the substrate). In some embodiments, the peptide has less than 100% sequence identity with SEQ ID NO: 3036. In some embodiments, a detectable bioluminescent signal is produced when the peptide component of a binary bioluminescent complex contacts a polypeptide component of the binary bioluminescent complex having greater than 40% (e.g., >40%, >45%, >50%, >55%, >60%, >65%, >70%, >75%, >80%, >85%, >90%, >95%, >98%, >99%, 100%) sequence identity with SEQ ID NO: 3037. In certain embodiments, the detectable bioluminescent signal is produced, or is substantially increased, when the peptide associates with the polypeptide comprising or consisting of SEQ ID NO: 3037. In preferred embodiments, the peptide exhibits alteration (e.g., enhancement) of one or more traits compared to a peptide of SEQ ID NO: 3038 or 3039, wherein the traits are selected from: affinity for the polypeptide consisting of SEQ ID NO: 3037, expression, intracellular solubility, intracellular stability, and bioluminescent activity when combined with the polypeptide consisting of SEQ ID NO: 3037.

[0268] Exemplary sequences of peptide components of binary bioluminescent complexes that find use in the embodiments herein are described, for example, in U.S. Pat. No. 9,797,889 (incorporated by reference in its entirety). Although the peptide components of binary bioluminescent complexes herein are not limited to these sequences, in some embodiments, the peptide component of a binary bioluminescent complex herein may be selected from amino acid sequences of SEQ ID NOS: 3-438 and 2162-2365 of U.S. Pat. No. 9,797,889 (incorporated by reference in its entirety).

[0269] In some embodiments, provided herein is a peptide component of a binary bioluminescent complex (e.g., within a fusion herein or as a standalone reporter or tag, etc.) having greater than 40% (e.g., >40%, >45%, >50%, >55%, >60%, >65%, >70%, >75%, >80%, >85%, >90%, >95%, >98%, >99%, 100%) sequence identity with SEQ ID NO: 3038, wherein a detectable bioluminescent signal is produced when the peptide component of a binary bioluminescent complex contacts a polypeptide consisting of SEQ ID NO: 3037 (e.g., within a fusion herein or as a standalone reporter or tag, etc.) in the presence of a substrate for the bioluminescent complex (e.g., greater luminescence that the components of the complex in the presence of the substrate). In some embodiments, the peptide has less than 100% sequence identity with SEQ ID NO: 3036. In some embodiments, a detectable bioluminescent signal is produced when the peptide component of a binary bioluminescent complex contacts a polypeptide component of the binary bioluminescent complex having greater than 40% (e.g., >40%, >45%, >50%, >55%, >60%, >65%, >70%, >75%, >80%, >85%, >90%, >95%, >98%, >99%, 100%) sequence identity with SEQ ID NO: 3037. In certain embodiments, the detectable bioluminescent signal is produced, or is substantially increased, when the peptide associates with the polypeptide comprising or consisting of SEQ ID NO: 3037. In some embodiments, the peptide exhibits high affinity for a polypeptide of SEQ ID NO: 3037 and is capable of forming a bioluminescent complex without facilitation. In preferred embodiments, the peptide exhibits alteration (e.g., enhancement) of one or more traits compared to a peptide of SEQ ID NO: 3036, wherein the traits are selected from: affinity for the polypeptide consisting of SEQ ID NO: 3037, expression, intracellular solubility, intracellular stability, and bioluminescent activity when combined with the polypeptide consisting of SEQ ID NO: 3037.

[0270] In some embodiments, provided herein is a peptide component of a binary bioluminescent complex (e.g., within a fusion herein or as a standalone reporter or tag, etc.) having greater than 40% (e.g., >40%, >45%, >50%, >55%, >60%, >65%, >70%, >75%, >80%, >85%, >90%, >95%, >98%, >99%, 100%) sequence identity with SEQ ID NO: 3039, wherein a detectable bioluminescent signal is produced when the peptide component of a binary bioluminescent complex contacts a polypeptide consisting of SEQ ID NO: 3037 (e.g., within a fusion herein or as a standalone reporter or tag, etc.) in the presence of a substrate for the bioluminescent complex (e.g., greater luminescence that the components of the complex in the presence of the substrate). In some embodiments, the peptide has less than 100% sequence identity with SEQ ID NO: 3036. In some embodiments, a detectable bioluminescent signal is produced when the peptide component of a binary bioluminescent complex contacts a polypeptide component of the binary bioluminescent complex having greater than 40% (e.g., >40%, >45%, >50%, >55%, >60%, >65%, >70%, >75%, >80%, >85%, >90%, >95%, >98%, >99%, 100%) sequence identity with SEQ ID NO: 3037. In certain embodiments, the detectable bioluminescent signal is produced, or is substantially increased, when the peptide associates with the polypeptide comprising or consisting of SEQ ID NO: 3037. In some embodiments, the peptide exhibits low affinity for a polypeptide of SEQ ID NO: 3037 and does not form a stable bioluminescent complex without facilitation. In preferred embodiments, the peptide exhibits alteration (e.g., enhancement) of one or more traits compared to a peptide of SEQ ID NO: 3036, wherein the traits are selected from: affinity (or low affinity) for the polypeptide consisting of SEQ ID NO: 3037, expression, intracellular solubility, intracellular stability, and bioluminescent activity when combined with the polypeptide consisting of SEQ ID NO: 3037. In some embodiments, provided herein is a polypeptide component of a binary bioluminescent complex (e.g., within a fusion herein or as a standalone reporter or tag, etc.) having greater than 40% (e.g., >40%, >45%, >50%, >55%, >60%, >65%, >70%, >75%, >80%, >85%, >90%, >95%, >98%, >99%, 100%) sequence identity with SEQ ID NO: 3037, wherein a detectable bioluminescent signal is produced when the polypeptide contacts a peptide consisting of SEQ ID NO: 3036 (e.g., within a fusion herein or as a standalone reporter or tag, etc.) in the presence of a substrate for the bioluminescent complex (e.g., greater luminescence that the components of the complex in the presence of the substrate). In some embodiments, a polypeptide component of a binary bioluminescent complex (e.g., within a fusion herein or as a standalone reporter or tag, etc.) has less than 100% sequence identity with SEQ ID NO: 3037. In some embodiments, a detectable bioluminescent signal is produced when the polypeptide contacts a peptide having greater than 40% (e.g., >40%, >45%, >50%, >55%, >60%, >65%, >70%, >75%, >80%, >85%, >90%, >95%, >98%, >99%, 100%) sequence identity with SEQ ID NO: 3036. In some embodiments, the polypeptide exhibits alteration (e.g., enhancement) of one or more traits compared to a peptide of SEQ ID NO: 3037, wherein the traits are selected from: affinity for the peptide consisting of SEQ ID NO: 3036 or 3038, expression, intracellular solubility, intracellular stability, and bioluminescent activity when combined with the peptide consisting of SEQ ID NO: 3036, 3038, or 3039.

[0271] Exemplary sequences of polypeptide components of binary bioluminescent complexes that find use in the embodiments herein are described, for example, in U.S. Pat. No. 9,797,889 (incorporated by reference in its entirety). Although the peptide components of binary bioluminescent complexes herein are not limited to these sequences, in some embodiments, the polypeptide component of a binary bioluminescent complex herein may be selected from amino acid sequences of SEQ ID NOS: 441-2156 of U.S. Pat. No. 9,797,889 (incorporated by reference in its entirety).

[0272] In certain embodiments, the present invention provides bioluminescent complexes (formed between the fusions described herein) comprising: (a) a peptide comprising a peptide amino acid sequence having greater than 40% (e.g., >40%, >45%, >50%, >55%, >60%, >65%, >70%, >75%, >80%, >85%, >90%, >95%, >98%, >99%, 100%) sequence identity with SEQ ID NO: 3036, 3038, or 3039; and (b) a polypeptide comprising a polypeptide amino acid sequence having greater than 40% (e.g., >40%, >45%, >50%, >55%, >60%, >65%, >70%, >75%, >80%, >85%, >90%, >95%, >98%, >99%, 100%) sequence identity with SEQ ID NO: 3037, wherein the bioluminescent complex exhibits detectable luminescence in the presence of a substrate for the bioluminescent complex (e.g., greater luminescence that the components of the complex in the presence of the substrate).

[0273] In some embodiments, provided herein is a polypeptide component of a binary bioluminescent complex (e.g., within a fusion herein or as a standalone reporter or tag, etc.) having greater than 40% (e.g., >40%, >45%, >50%, >55%, >60%, >65%, >70%, >75%, >80%, >85%, >90%, >95%, >98%, >99%, 100%) sequence identity with SEQ ID NO: 3037, wherein a detectable bioluminescent signal is produced when the polypeptide contacts a peptide consisting of SEQ ID NO: 3036, 3038, or 3039 (e.g., within a fusion herein or as a standalone reporter or tag, etc.) in the presence of a substrate for the bioluminescent complex (e.g., greater luminescence that the components of the complex in the presence of the substrate).

[0274] In some embodiments, provided herein (alone and/or within fusions described herein) are components of a bioluminescent complex comprising a first component having 40% or greater (e.g., 40%, 45%, 50%, 55%, 60%, 65%, 70%, 75%, 80%, 85%, 90%, 95%, or more (e.g., 100%), or ranges therebetween) sequence identity to a first fragment of SEQ ID NO: 3040 or SEQ ID NO: 3041; and one or more complementary fragments collectively comprising 40% or greater (e.g., 40%, 45%, 50%, 55%, 60%, 65%, 70%, 75%, 80%, 85%, 90%, 95%, or more (e.g., 100%), or ranges therebetween) sequence identity to the complementary portion of SEQ ID NO: 3040 or SEQ ID NO: 3041; wherein a bioluminescent signal produced by a bioluminescent complex assembled of the components in the presence of a coelenterazine or a coelenterazine derivative substrate is substantially increased when compared to a bioluminescent signal produced by the coelenterazine substrate and individual components alone. In some embodiments, the first component comprises 40% or greater (e.g., 40%, 45%, 50%, 55%, 60%, 65%, 70%, 75%, 80%, 85%, 90%, 95%, or more (e.g., 100%), or ranges therebetween) sequence identity to SEQ ID NO: 3042, and the one or more complementary components collectively comprising 40% or greater (e.g., 40%, 45%, 50%, 55%, 60%, 65%, 70%, 75%, 80%, 85%, 90%, 95%, or more (e.g., 100%), or ranges therebetween) sequence identity to SEQ ID NO: 3046. In some embodiments, the first component comprises 40% or greater (e.g., 40%, 45%, 50%, 55%, 60%, 65%, 70%, 75%, 80%, 85%, 90%, 95%, or more (e.g., 100%), or ranges therebetween) sequence identity to SEQ ID NO: 3043, and the one or more complementary components collectively comprising 40% or greater (e.g., 40%, 45%, 50%, 55%, 60%, 65%, 70%, 75%, 80%, 85%, 90%, 95%, or more (e.g., 100%), or ranges therebetween) sequence identity to SEQ ID NO: 3047. In some embodiments, the first component comprises 40% or greater (e.g., 40%, 45%, 50%, 55%, 60%, 65%, 70%, 75%, 80%, 85%, 90%, 95%, or more (e.g., 100%), or ranges therebetween) sequence identity to SEQ ID NO: 3044, and the one or more complementary components collectively comprising 40% or greater (e.g., 40%, 45%, 50%, 55%, 60%, 65%, 70%, 75%, 80%, 85%, 90%, 95%, or more (e.g., 100%), or ranges therebetween) sequence identity to SEQ ID NO: 3048. In some embodiments, the first component comprises 40% or greater (e.g., 40%, 45%, 50%, 55%, 60%, 65%, 70%, 75%, 80%, 85%, 90%, 95%, or more (e.g., 100%), or ranges therebetween) sequence identity to SEQ ID NO: 3045, and the one or more complementary components collectively comprising 40% or greater (e.g., 40%, 45%, 50%, 55%, 60%, 65%, 70%, 75%, 80%, 85%, 90%, 95%, or more (e.g., 100%), or ranges therebetween) sequence identity to SEQ ID NO: 3049. In some embodiments, the first component comprises 40% or greater (e.g., 40%, 45%, 50%, 55%, 60%, 65%, 70%, 75%, 80%, 85%, 90%, 95%, or more (e.g., 100%), or ranges therebetween) sequence identity to SEQ ID NO: 3042, and the one or more complementary components collectively comprising 40% or greater (e.g., 40%, 45%, 50%, 55%, 60%, 65%, 70%, 75%, 80%, 85%, 90%, 95%, or more (e.g., 100%), or ranges therebetween) sequence identity to SEQ ID NO: 3050. In some embodiments, the first component comprises 40% or greater (e.g., 40%, 45%, 50%, 55%, 60%, 65%, 70%, 75%, 80%, 85%, 90%, 95%, or more (e.g., 100%), or ranges therebetween) sequence identity to SEQ ID NO: 3043, and the one or more complementary components collectively comprising 40% or greater (e.g., 40%, 45%, 50%, 55%, 60%, 65%, 70%, 75%, 80%, 85%, 90%, 95%, or more (e.g., 100%), or ranges therebetween) sequence identity to SEQ ID NO: 3051. In some embodiments, the first component comprises 40% or greater (e.g., 40%, 45%, 50%, 55%, 60%, 65%, 70%, 75%, 80%, 85%, 90%, 95%, or more (e.g., 100%), or ranges therebetween) sequence identity to SEQ ID NO: 3044, and the one or more complementary components collectively comprising 40% or greater (e.g., 40%, 45%, 50%, 55%, 60%, 65%, 70%, 75%, 80%, 85%, 90%, 95%, or more (e.g., 100%), or ranges therebetween) sequence identity to SEQ ID NO: 3052. In some embodiments, the first component comprises 40% or greater (e.g., 40%, 45%, 50%, 55%, 60%, 65%, 70%, 75%, 80%, 85%, 90%, 95%, or more (e.g., 100%), or ranges therebetween) sequence identity to SEQ ID NO: 3045, and the one or more complementary components collectively comprising 40% or greater (e.g., 40%, 45%, 50%, 55%, 60%, 65%, 70%, 75%, 80%, 85%, 90%, 95%, or more (e.g., 100%), or ranges therebetween) sequence identity to SEQ ID 3053. In some embodiments, the bioluminescent signal is substantially increased when the first component associates with the one or more complementary components.

[0275] Exemplary sequences of peptide and polypeptide components of binary or multipartite bioluminescent complexes that find use in the embodiments herein are described, for example, in U.S. application Ser. No. 16/439,565 (incorporated by reference in its entirety). Although the peptide and polypeptide components of binary or multipartite bioluminescent complexes herein are not limited to these sequences, in some embodiments, a peptide or polypeptide component of a binary or multipartite bioluminescent complex herein may be selected from amino acid sequences of SEQ ID NOS: 1-804 of U.S. application Ser. No. 16/439,565 (incorporated by reference in its entirety).

[0276] In some embodiments, provided herein are polypeptides (e.g., within a fusion described herein) comprising 40% or greater (e.g., 40%, 45%, 50%, 55%, 60%, 65%, 70%, 75%, 80%, 85%, 90%, 95%, or more (e.g., 100%), or ranges therebetween) sequence identity with one of SEQ ID NO: 790, 791, 792, or 793.

[0277] In some embodiments, provided herein are peptides polypeptides (e.g., within a fusion described herein) comprising SEQ ID NO: 3054-3060. In some embodiments, provided herein are peptides (e.g., within a fusion described herein) comprising 40% or greater (e.g., 40%, 45%, 50%, 55%, 60%, 65%, 70%, 75%, 80%, 85%, 90%, 95%, or more (e.g., 100%), or ranges therebetween) sequence identity with one of SEQ ID NO: 3054-3060.

[0278] In some embodiments, provided herein is a β6-7-like peptide (e.g., within a fusion described herein) comprising SEQ ID NOS: 3054 and 3055. In some embodiments, provided herein is a β6-7-like peptide having 40% or greater (e.g., 40%, 45%, 50%, 55%, 60%, 65%, 70%, 75%, 80%, 85%, 90%, 95%, or more (e.g., 100%), or ranges therebetween) sequence identity with SEQ ID NOS: 3054 and 3055.

[0279] In some embodiments, provided herein is a β7-8-like peptide (e.g., within a fusion described herein) comprising SEQ ID NOS: 3055 and 3056. In some embodiments, provided herein is a β7-8-like peptide (e.g., within a fusion described herein) having 40% or greater (e.g., 40%, 45%, 50%, 55%, 60%, 65%, 70%, 75%, 80%, 85%, 90%, 95%, or more (e.g., 100%), or ranges therebetween) sequence identity with SEQ ID NOS: 3055 and 3056.

[0280] In some embodiments, provided herein is a β8-9-like peptide (e.g., within a fusion described herein) comprising SEQ ID NOS: 3056/3059 or 3056/3060. In some embodiments, provided herein is a β8-9-like peptide (e.g., within a fusion described herein) having 40% or greater (e.g., 40%, 45%, 50%, 55%, 60%, 65%, 70%, 75%, 80%, 85%, 90%, 95%, or more (e.g., 100%), or ranges therebetween) sequence identity with SEQ ID NOS: 3056/3059 or 3056/3060.

[0281] In some embodiments, provided herein is a β9-10-like peptide (e.g., within a fusion described herein) comprising SEQ ID NOS: 3059/3057, 3059/3058, 3060/3057, or 3060/3058. In some embodiments, provided herein is a β8-9-like peptide (e.g., within a fusion described herein) having 40% or greater (e.g., 40%, 45%, 50%, 55%, 60%, 65%, 70%, 75%, 80%, 85%, 90%, 95%, or more (e.g., 100%), or ranges therebetween) sequence identity with SEQ ID NOS: 3059/3057, 3059/3058, 3060/3057, or 3060/3058.

[0282] In some embodiments, provided herein is a β6-8-like peptide or polypeptide (e.g., within a fusion described herein) comprising SEQ ID NOS: 3054-3056. In some embodiments, provided herein is a β6-8-like peptide or polypeptide (e.g., within a fusion described herein) having 40% or greater (e.g., 40%, 45%, 50%, 55%, 60%, 65%, 70%, 75%, 80%, 85%, 90%, 95%, or more (e.g., 100%), or ranges therebetween) sequence identity with SEQ ID NOS: 3054-3056.

[0283] In some embodiments, provided herein is a β7-9-like peptide or polypeptide (e.g., within a fusion described herein) comprising SEQ ID NOS: 3055/3056/3059 or 3055/3056/3060. In some embodiments, provided herein is a β7-9-like peptide or polypeptide (e.g., within a fusion described herein) having 40% or greater (e.g., 40%, 45%, 50%, 55%, 60%, 65%, 70%, 75%, 80%, 85%, 90%, 95%, or more (e.g., 100%), or ranges therebetween) sequence identity with SEQ ID NOS: 3055/3056/3059 or 3055/3056/3060.

[0284] In some embodiments, provided herein is a β8-10-like peptide or polypeptide (e.g., within a fusion described herein) comprising SEQ ID NOS: 3056/3059/3057, 3056/3059/3058, 3056/3060/3057, or 3056/3060/3058. In some embodiments, provided herein is a β7-9-like peptide or polypeptide (e.g., within a fusion described herein) having 40% or greater (e.g., 40%, 45%, 50%, 55%, 60%, 65%, 70%, 75%, 80%, 85%, 90%, 95%, or more (e.g., 100%), or ranges therebetween) sequence identity with NOS: SEQ ID NOS: 3056/3059/3057, 3056/3059/3058, 3056/3060/3057, or 3056/3060/3058.

### Tandem Peptide Tags

[0285] In some embodiments, provided herein are a tandem peptide tags comprising (i) a peptide component of a bioluminescent complex fused to (ii) a peptide component of a modified dehalogenase complex. In some embodiments, the peptide component of a bioluminescent complex is capable of forming a bioluminescent complex with a polypeptide component of the bioluminescent complex upon interaction therebetween (e.g., facilitated or unfacilitated). In some embodiments, the peptide component of a modified dehalogenase complex is capable of forming a modified dehalogenase complex with a polypeptide component of the modified dehalogenase complex upon interaction therebetween (e.g., facilitated or unfacilitated). In some embodiments, the bioluminescent complex and modified dehalogenase complex form upon interaction (facilitated or unfacilitated) of the tandem peptide tag and a tandem polypeptide reporter (e.g., comprising the polypeptide component of the bioluminescent complex fused to the polypeptide component of the modified dehalogenase complex). In some embodiments, the bioluminescent complex is capable of generating bioluminescence in the presence of a substrate (e.g., coelenterazine, furimazine, etc.), and the modified dehalogenase complex is capable of binding to a haloalkane ligand.

[0286] In some embodiments, a tandem peptide tag herein comprises a first component that is a component of a bioluminescent complex, as described herein and throughout U.S. Pat. No. 9,797,889 and U.S. application Ser. No. 16/439,565, both of which are herein incorporated by reference in their entireties. Any of the components of the bioluminescent complexes described herein or incorporated by reference may find use in the tandem peptide tags herein. In particular embodiments, a tandem peptide tag herein comprises a peptide component of a bioluminescent complex.

[0287] In some embodiments, a tandem peptide tag herein comprises a second component that is a component of a modified dehalogenase complex, as described herein and throughout U.S. Prov. App. No. 63/338,323, and U.S. application Ser. No. 18/312,117, both of which are herein incorporated by reference in their entireties. Any of the components of the modified dehalogenase complexes described herein or incorporated by reference may find use in the tandem peptide tags herein. In particular embodiments, a tandem peptide tag herein comprises a peptide component of a modified dehalogenase complex.

[0288] In some embodiments, a tandem peptide tag comprising a component of a bioluminescent complex and a component a modified dehalogenase complex is fused or otherwise linked to a peptide or protein of interest. In some embodiments, the tandem peptide tag is expressed as a fusion with the peptide or protein of interest. In some embodiments, the peptide or protein of interest is a cellular target to be detected, quantified, or otherwise characterized by using the systems and methods herein.

[0289] In some embodiments, a tandem peptide tag herein comprises at least 70% (e.g., 70%, 75%, 80%, 85%, 90%, 95%, 100%, or ranges therebetween) sequence identity to one or more of SEQ ID NOS: 3062-3063, 3067-3078, 3092, 3094-3109, and 4177-4181. In some embodiments, the peptide component of a modified dehalogenase portion (e.g., SmHT) of a tandem peptide tag herein comprises one or more substitutions relative to a reference SmHT peptide of any of the SmHT variant peptides herein and/or SmHT portions of one or more of SEQ ID NOS: 3062-3063, 3067-3078, 3092, and 3094-3109. In some embodiments, the peptide component of a bioluminescent complex portion (e.g., HiBiT) of a tandem peptide tag herein comprises one or more substitutions relative to a reference HiBiT peptide of any of the HiBiT variant peptides herein and/or HiBiT portions of one or more of SEQ ID NOS: 3062-3063, 3067-3078, 3092, 3094-3109, and 4177-4181.

### Tandem Polypeptide Reporters

[0290] In some embodiments, provided herein are a tandem polypeptide reporters comprising a polypeptide component of a bioluminescent complex fused to a polypeptide component of a modified dehalogenase complex. In some embodiments, the polypeptide component of a bioluminescent complex is capable of forming a bioluminescent complex with a peptide component of the bioluminescent complex upon interaction therebetween (e.g., facilitated or unfacilitated). In some embodiments, the polypeptide component of a modified dehalogenase complex is capable of forming a modified dehalogenase complex with a peptide component of the modified dehalogenase complex upon interaction therebetween (e.g., facilitated or unfacilitated). In some embodiments, the bioluminescent complex and modified dehalogenase complex form upon interaction (facilitated or unfacilitated) of the tandem polypeptide reporter and a tandem peptide tag (e.g., comprising the peptide component of the bioluminescent complex fused to the peptide component of the modified dehalogenase complex). In some embodiments, the bioluminescent complex can generate bioluminescence in the presence of a substrate (e.g., coelenterazine, furimazine, etc.), and the modified dehalogenase complex is capable of binding to a haloalkane ligand.

[0291] In some embodiments, a tandem polypeptide reporter herein comprises a first component that is a component of a bioluminescent complex, as described herein and throughout U.S. Pat. No. 9,797,889 and U.S. application Ser. No. 16/439,565, both of which are herein incorporated by reference in their entireties. Any of the components of the bioluminescent complexes described herein or incorporated by reference may find use in the tandem polypeptide reporters herein. In particular embodiments, a tandem polypeptide reporter herein comprises a polypeptide component of a bioluminescent complex.

[0292] In some embodiments, a tandem polypeptide reporter herein comprises a second component that is a component of a modified dehalogenase complex, as described herein and throughout U.S. Prov. App. No. 63/338,323, and U.S. application Ser. No. 18/312,117, both of which are herein incorporated by reference in their entireties. Any of the components of the modified dehalogenase complexes described herein or incorporated by reference may find use in the tandem polypeptide reporters herein. In particular embodiments, a tandem polypeptide reporter herein comprises a polypeptide component of a modified dehalogenase complex.

[0293] In some embodiments, a tandem polypeptide reporter herein comprises at least 70% (e.g., 70%, 75%, 80%, 85%, 90%, 95%, 100%, or ranges therebetween) sequence identity to one or more of SEQ ID NOS: 3110-4064. In some embodiments, the polypeptide component of a modified dehalogenase portion (e.g., LgHT) of a tandem polypeptide reporter herein comprises one or more substitutions relative to a reference LgHT peptide of any of the LgHT variant peptides herein and/or LgHT portions of one or more of SEQ ID NOS: 3110-4064. In some embodiments, the peptide component of a bioluminescent complex portion (e.g., HiBiT) of a tandem polypeptide reporter herein comprises one or more substitutions relative to a reference HiBiT peptide of any of the HiBiT variant peptides herein and/or HiBiT portions of one or more of SEQ ID NOS: 3110-4064.

### Other Tandem Tags and Reporters

[0294] Embodiments herein are predominantly described as tags comprising fused peptide components of bioluminescent and modified dehalogenase complexes and reporters comprising fused polypeptide components of the complexes. However, embodiments within the scope herein also include tags (e.g., for linking/fusing to a target) comprising: the polypeptide components of the bioluminescent and modified dehalogenase complexes, the polypeptide component of the bioluminescent complex and the peptide component of the modified dehalogenase complex, or the peptide component of the bioluminescent complex and the polypeptide component of the modified dehalogenase complex; and reporters comprising the peptide components of the bioluminescent and modified dehalogenase complexes, the polypeptide component of the bioluminescent complex and the peptide component of the modified dehalogenase complex, or the peptide component of the bioluminescent complex and the polypeptide component of the modified dehalogenase complex. Any suitable arrangement of the components described herein is within the scope.

### Linkers

[0295] Various fusions are described herein. In some embodiments, the components of the fusion are directly linked (e.g., C-terminus to N-terminus). In other embodiments, the fusions herein comprise peptide or polypeptide linkers between the components. Such linkers may be of any suitable sequence and up to 100 amino acids in length (e.g., 1, 2, 3, 4, 5, 6, 7, 8, 9, 10, 15, 20, 25, 30, 35, 40, 445, 50, 60, 70, 80, 90, 100, or ranges therebetween). In some embodiments, a tandem peptide tag herein comprises a linker sequence between the peptide component of the modified dehalogenase complex and the peptide component of the bioluminescent complex. In some embodiments, a tandem peptide tag is linked to a target element by a suitable linker sequence. In some embodiments, a tandem detector herein comprises a linker sequence between the polypeptide component of the modified dehalogenase complex and the polypeptide component of the bioluminescent complex. Exemplary linker sequences are provided in the tandem tags and tandem detectors exemplified herein, but other linker sequences are within the scope herein. Any peptide/polypeptide sequence capable of linking the components of a construct herein is within the scope herein, including but not limited to those specifically exemplified herein, both in terms of length and amino acid composition.

### Haloalkyl Ligands

[0296] As described herein, the spHT systems (e.g., within the fusions herein) utilize haloalkane ligands. In some embodiments, the ligand is of formula (I): R-linker-A-X, wherein R is a solid surface, one or more functional groups, or absent, wherein the linker is a multiatom straight or branched chain including C, N, S, or O, or a group that comprises one or more rings, e.g., saturated or unsaturated rings, such as one or more aryl rings, heteroaryl rings, or any combination thereof, wherein A-X is a ligand for a dehalogenase, hydrolase, HALOTAG, or a spHT system herein (e.g., wherein A is (CH₂)₄₋₂₀ and X is a halide (e.g., Cl or Br)). Suitable ligands are described, for example, in U.S. Pat. Nos. 11,072,812; 11,028,424; 10,618,907; and 10,101,332; incorporated by reference in their entireties. In certain embodiments, X of formula (I) is a methylsulfonamide or trifluoromethylsulfonamide, rather than a halide; such an embodiment results in an exchangeable ligand that reversibly binds to a modified dehalogenase (e.g., HALOTAG). Such ligands are described in, for example, Kompa et al. J. Am. Chem. Soc. 2023, 145, 5, 3075-3083; incorporated by reference in its entirety.

[0297] In some embodiments, R is one or more functional groups (such as a fluorophore, biotin, luminophore, or a fluorogenic or luminogenic molecule). Exemplary functional groups for use in the invention include, but are not limited to, an amino acid, protein, e.g., enzyme, antibody or other immunogenic protein, a radionuclide, a nucleic acid molecule, a drug, a lipid, biotin, avidin, streptavidin, a magnetic bead, a solid support, an electron opaque molecule, chromophore, MRI contrast agent, a dye, e.g., a xanthene dye, a calcium sensitive dye, e.g., 1-[2-amino-5-(2,7-dichloro-6-hydroxy-3-oxy-9-xanthenyl)-phenoxy]-2-(2′-am-ino-5′-methylphenoxy)ethane-N,N,N′,N′-tetraacetic acid (Fluo-3), a sodium sensitive dye, e.g., 1,3-benzenedicarboxylic acid, 4,4′-[1,4,10,13-tetraoxa-7,16-diazacyclooctadecane-7,16-diylbis(5-methoxy-6,2-benzofurandiyl)]bis (PBFI), a NO sensitive dye, e.g., 4-amino-5-methylamino-2′,7′-difluorescein, or other fluorophore. In one embodiment, the functional group is an immunogenic molecule, i.e., one which is bound by antibodies specific for that molecule.

[0298] In some embodiments, ligands of the invention are permeable to the plasma membranes of cells (i.e., capable of passing from the exterior of a cell (e.g., eukaryotic, prokaryotic) to the cellular interior without chemical, enzymatic, or mechanical disruption of the cell membrane).

[0299] In some embodiments, ligands herein comprise a cleavable linker, for example, those described in U.S. Pat. No. 10,618,907; incorporated by reference in its entirety.

[0300] In some embodiments, a ligand comprises a fluorescent functional group (R). Suitable fluorescent functional groups include, but are not limited to: stilbazolium derivatives (Marquesa et al. Mechanism-Based Strategy for Optimizing HaloTag Protein Labeling. ChemRxiv. Cambridge: Cambridge Open Engage; 2021; incorporated by reference in its entirety), xanthene derivatives (e.g., fluorescein, rhodamine, Oregon green, eosin, Texas red, etc.), cyanine derivatives (e.g., cyanine, indocarbocyanine, oxacarbocyanine, thiacarbocyanine, merocyanine, etc.), naphthalene derivatives (e.g., dansyl and prodan derivatives), oxadiazole derivatives (e.g., pyridyloxazole, nitrobenzoxadiazole, benzoxadiazole, etc.), pyrene derivatives (e.g., cascade blue), oxazine derivatives (e.g., Nile red, Nile blue, cresyl violet, oxazine 170, etc.), acridine derivatives (e.g., proflavin, acridine orange, acridine yellow, etc.), arylmethine derivatives (e.g., auramine, crystal violet, malachite green, etc.), tetrapyrrole derivatives (e.g., porphin, phtalocyanine, bilirubin, etc.), CF dye (Biotium), BODIPY (Invitrogen), ALEXA FLOUR (Invitrogen), DYLIGHT FLUOR (Thermo Scientific, Pierce), ATTO and TRACY (Sigma Aldrich), FluoProbes (Interchim), DY and MEGASTOKES (Dyomics), SULFO CY dyes (CYANDYE, LLC), SETAU AND SQUARE DYES (SETA BioMedicals), QUASAR and CAL FLUOR dyes (Biosearch Technologies), SURELIGHT DYES (APC, RPE, PerCP, Phycobilisomes)(Columbia Biosciences), APC, APCXL, RPE, BPE (Phyco-Biotech), autofluorescent proteins (e.g., YFP, RFP, mCherry, mKate), quantum dot nanocrystals, etc.

[0301] In some embodiments, a ligand comprises a fluorogenic functional group (R). A fluorogenic functional group is one that produces and enhanced fluorescent signal upon binding of the ligand to a target (e.g., binding of a haloalkane to a modified dehalogenase). By producing significantly increased fluorescence (e.g., 10×, 31×, 50×, 100×, 310×, 500×, 1000×, or more) upon target engagement, the problem of background signal is alleviated. Exemplary fluorogenic dyes for use in embodiments herein include the JANELIA FLUOR family of fluorophores, such as:

[chemical structure]

[chemical structure]

[chemical structure]

[chemical structure]

(see, e.g., U.S. Pat. Nos. 9,933,417; 10,018,624; 10,161,932; and 10,495,632; each of which is incorporated by reference in their entireties). In some embodiments, exemplary conjugates of JANELIA FLUOR 549 and JANELIA FLUOR 646 with haloalkane ligands for modified dehalogenase (e.g., HALOTAG) are commercially available (Promega Corp.). The use and design of fluorogenic functional groups, dyes, probes, and ligands is described in, for example, Grimm et al. Nat Methods. 3117 October; 14(10):987-994; Wang et al. Nat Chem. 3120 February; 12(2):165-172; incorporated by reference in their entireties.

[0302] In some embodiments a fluorophore or fluorogenic dye herein is a rhodamine and/or rhodol dye.

[0303] In some embodiments, the fluorophore (R) is of the structure:

[chemical structure]

wherein Y is C, O, or Si, and wherein if Y is C or Si it is substituted with two CH₃ groups; wherein each of R¹, R², R³, R⁴, and R⁵ are independently H or F (e.g., R¹-R⁵ are all H; R¹-R⁵ are all F; R¹ and R² are F and R³ is H; R¹-R³ are F and R⁴-R⁵ are H, R¹ and R² are F and R³-R⁵ are H, etc.). In some embodiments, the azetidine are further substituted with one or two nonhydrogen substituents at the 3-position (e.g., CO²H, CH₃, F, etc.). In some embodiments, an exemplary compound herein is of the structure:

[chemical structure]

(wherein R¹⁻⁵ and Y are defined as above, Y and the azetidine are optionally substituted as above, and alternative linker and A-X groups are also within the scope).

[0304] In some embodiments, the fluorophore (R) is of the structure:

[chemical structure]

wherein Y is C, O, or Si, and wherein if Y is C or Si it is substituted with two CH₃ groups; wherein each of R¹, R², R³, R⁴, and R⁵ are independently H or F (e.g., R¹-R⁵ are all H; R¹-R⁵ are all F; R¹ and R² are F and R³ is H; R¹-R³ are F and R⁴-R⁵ are H, R¹ and R² are F and R³-R⁵ are H, etc.); and wherein each

[chemical structure]

comprises an azetidine or a fully deuterated pyrrolidine. In some embodiments, the azetidine, when present are further substituted with one or two nonhydrogen substituents at the 3-position (e.g., CO²H, CH₃, F, etc.). In some embodiments, an exemplary compound herein is of the structure:

[chemical structure]

wherein R¹⁻⁵, Y, and

[chemical structure]

are defined as above, Y and the azetidine are optionally substituted as above, and alternative linker and A-X groups are also within the scope.

[0305] In some embodiments, the linker is a multiatom straight or branched chain including C, N, S, or O, or a group that comprises one or more rings, e.g., saturated or unsaturated rings, such as one or more aryl rings, heteroaryl rings, or any combination thereof. In some embodiments, the linker comprises a combination of —O(CH₂)₂— —(CH2)O—, —CH₂—, —NHC(O)O—, —OC(O)NH—, NHC(O)—, and —C(O)NH—. In some embodiments, the linker is 5 to 50 (e.g., 5, 10, 15, 20, 25, 30, 35, 40, 45, 50, or ranges therebetween) atoms in length. In some embodiments, the length of the linker for tethering the alkylhalide to R allows for optimization of proximity and geometry (e.g., for binding of a modified dehalogenase complex to the alkylhalide, for function of the functional moiety (e.g., fluorescence), etc.). The scope of embodiments herein is not limited by the types of linkers available. The fluorophore and A-X may be linked either directly (e.g., linker consists of a single covalent bond) or linked via a suitable linker. Embodiments are not limited to any particular linker group. A variety of linker groups are contemplated, and suitable linkers could comprise, but are not limited to, alkyl groups, methylene carbon chains, ether, polyether, alkyl amide linker, a peptide linker, a modified peptide linker, a Poly(ethylene glycol) (PEG) linker, a streptavidin-biotin or avidin-biotin linker, polyaminoacids (e.g., polylysine), functionalized PEG, polysaccharides, glycosaminoglycans, dendritic polymers (WO93/06868 and by Tomalia et al. in Angew. Chem. Int. Ed. Engl. 29:138-175 (1990), herein incorporated by reference in their entireties), PEG-chelant polymers (W94/08629, WO94/09056 and WO96/26754, herein incorporated by reference in their entireties), oligonucleotide linker, phospholipid derivatives, alkenyl chains, alkynyl chains, disulfide, or a combination thereof. In some embodiments, the linker is cleavable (e.g., enzymatically (e.g., TEV protease site), chemically, photoinduced, etc. In some embodiments, the cleavable linker comprises an allyl-heteroatom group or a propargyl-heteroatom group, such as the linkers described, for example, in U.S. application Ser. No. 16/813,295; incorporated by reference in its entirety.

[0306] The haloalkyl ligands herein comprise a haloalkyl group, a linker, and a functional group. Exemplary compounds comprising a rhodamine dye linked to a haloalkane include:

[chemical structure]

[chemical structure]

[chemical structure]

[chemical structure]

[chemical structure]

Other ligands comprising different halides (e.g., Br), different length of composition of A, and different R groups (e.g., biotin, other fluorophores, etc.) are within the scope herein. Other non-limiting examples of haloalkyl ligands that may find use in embodiments herein include:

[chemical structure]

[chemical structure]

[chemical structure]

[chemical structure]

etc. (wherein alternative R, linker, and A-X groups are also within the scope).

### Bioluminescent Substrates

[0307] In some embodiments, the systems herein (comprising a bioluminescent complex and/or components thereof) utilize an imidazopyrazine luminophore substrate to generate bioluminescence. In some embodiments, the substrate is coelenterazine:

[chemical structure]

[0308] In some embodiments, the substrate is a coelenterazine derivative, such as, furimazine, furimazine analogs (e.g., fluorofurimazine), coelenterazine-n, coelenterazine-f, coelenterazine-h, coelenterazine-hcp, coelenterazine-cp, coelenterazine-c, coelenterazine-e, coelenterazine-fcp, bis-deoxycoelenterazine (“coelenterazine-hh”), coelenterazine-i, coelenterazine-icp, coelenterazine-v, and 2-methyl coelenterazine, in addition to those disclosed in WO 2003/040100; U.S. application Ser. No. 12/056,073 (paragraph [0086]); U.S. Pat. No. 8,669,103; U.S. Prov. App. No. 63/379,573; the disclosures of which are incorporated by reference herein in their entireties.

[0309] In some embodiments, the substrate is furimazine:

[chemical structure]

[0310] In some embodiments the substrate is fluorofurimazine:

[chemical structure]

### Additional Reporter Peptides

[0311] In some embodiments, a bioluminescent and/or modified dehalogenase complex is a tripartite or multipartite complex (e.g., comprising three or more peptide/polypeptide components). In such embodiments, a first component of the complex may be present within the tandem peptide tag, a second component of the complex may be present within the tandem polypeptide reporter, and a third (or fourth or more) component of the complex may be present as an additional reporter. In some embodiments, interaction of the additional reporter, tandem polypeptide reporter, and tandem peptide tag (facilitated or unfacilitated) results in formation of the modified dehalogenase and bioluminescent complexes.

[0312] The additional reporter may be present as a fusion with one or more additional elements or amino acid sequences (e.g., interaction element, target protein, etc.). In some embodiments, the additional amino acid sequence is selected from the group consisting of a protein of interest, an interaction element, a co-localization element, and a binding moiety. In some embodiments, the additional amino acid sequence is a binding moiety selected from the group consisting of an antibody (polyclonal, monoclonal, and/or recombinant), antibody fragment, protein A, an Ig binding domain of protein A, protein G, an Ig binding domain of protein G, protein A/G, an Ig binding domain of protein A/G, protein L, a Ig binding domain of protein L, protein M, an Ig binding domain of protein M, peptide nucleic acid, DARPin, affimer, a purified protein (either the analyte itself or a protein that binds to the analyte), and analyte binding domain(s) of proteins. In some embodiments, the additional amino acid sequence is a first interaction polypeptide that is configured to form a complex with a second interaction polypeptide upon contact of the first interaction polypeptide and the second interaction polypeptide. In some embodiments, the additional amino acid sequence is a first co-localization polypeptide that is configured to co-localize within a cellular compartment, a cell, a tissue, or an organism within a with a second co-localization polypeptide. In some embodiments, the additional amino acid sequence is a protein of interest and is a candidate drug target. In some embodiments, the additional amino acid sequence is a fluorescent protein (e.g., GFP and variants thereof), a luciferase (e.g., Firefly or Renilla, etc.), SPYTAG, SPYCATCHER, SNAP-tag, CLIP-tag, etc.

### Description of the Systems

[0313] In some embodiments, systems are provided comprising bioluminescent and modified dehalogenase complexes and the components thereof. In some embodiments, provided herein are protein complementation systems (and components thereof) capable of both luminescence and fluorescence detection based on combining split NanoLuc® and split HaloTag® technologies. Certain embodiments are described in connection split NANOLUC-based systems and components (e.g., NanoBiT, NanoTrip, smBiT, HiBiT, LgBiT, etc., and variants thereof) and split HALOTAG-based systems and components (e.g., spHT, SmHT, LgHT, etc. and variants thereof). Experiments have been conducted combining two small peptide tags from each system in tandem (e.g., SmHT-HiBiT) demonstrating the tandem peptide tag can facilitate complementation with either technology by adding their cognate large sequence, LgHT or LgBiT, both separately and simultaneously. Additionally, experiments have demonstrated fusion of the reporter polypeptides into a single tandem reporter polypeptide (e.g., LgHT-LgBiT). An advantage of the LgHT-LgBiT reporter polypeptide is that the high affinity of the HiBiT:LgBiT interaction facilitates the SmHT:LgHT complementation in the complex, thereby providing the functionality of a high-affinity/spontaneous split HaloTag® system.

[0314] In some embodiments, the tags and reporters herein are not limited to combinations of the peptide components and polypeptide components. For example, a peptide component of a NanoLuc®-based complementation system can be fused with a polypeptide component of a HaloTag®-based complementation system for complementation with a fusion of a NanoLuc®-based polypeptide component and a HaloTag®-based peptide component. Additionally, the various components can be combined in different configurations or orientations, such as SmHT-LgBiT and HiBiT-LgHT. In some embodiments, the fusions herein comprise linkers to facilitate optimized geometries for complementation, ligand/substrate binding, etc. In some embodiments, the sequences of the HaloTag®-based components and NanoLuc®-based components are not limited to the commercially- or publicly-available sequences of the HaloTag, NanoLuc, or binary multipartite complementation systems thereof.

[0315] In some embodiments herein, a peptide component of a bioluminescent complex is fused to a peptide components of a modified dehalogenase complex to form a tandem peptide tag. In some systems, methods, assays, etc., there are certain advantages of fusion configurations in which the two peptide components are fused as a tandem tag and the two polypeptide components are fused as a tandem reporter. The small tag fusion is still a peptide-sized sequence (e.g., 28 amino acids (17 AA SmHT+11 AA HiBiT)). This is still within the size range (84 nucleotides) for convenient synthesis as a single-stranded donor DNA oligonucleotide and efficient delivery during CRISPR genome engineering to introduce the tandem tag on an endogenous protein target. In some embodiments, there is also the potential benefit of a small tag being minimally perturbing to its target protein fusion partner. Exemplary configurations of this tandem peptide tag include different versions including SmBiT, HiBiT, and other variants to those sequences that alter their affinity. Hundreds of sequence variants of the SmHT, all of which remain low affinity to LgHT and are functional in the complementation system. In some embodiments, any SmHT variants having desirable properties for both in vivo and in vitro use, alone and in tandem with the SmBiT/HiBiT (or variants thereof), such as altered charge and hydrophobicity or cysteine/arginine residues that enable chemical modification, find use in embodiments herein. Since HiBiT, for example, is positively charged, it may be preferable to have positively charged variants of the SmHT in the context of the SmHT-HiBiT fusion tag to maintain similar physical attributes across the length of the peptide tag. In some embodiments, there are advantages to introducing linkers between the SmHT and SmBiT/LgBiT in the fusion tag or changing their orientation, to minimize any potential stearic limitations on complementation, orientation, or flexibility. Alternative orientations include using each tag on a separate terminus (N- or C-) of the target protein, for example, in a protein where the termini are in close proximity, whereby the LgHT-LgBiT detector polypeptide could still form a complemented complex with both tags simultaneously.

[0316] In some embodiments, the user may only desire to use one technology, and the other is unused/noninterfering. For example, in some embodiments, the fluorescence component of embodiments of the present technology allows for fluorescent cell sorting after CRISPR editing to more effectively/rapidly isolate cells that contain the tag, whereafter a user may primarily be interested in using the HiBiT portion of the tag for downstream measurement of biological events inside the cells. Yet another example is the concept that the high affinity LgBiT:HiBiT interaction spontaneously facilitates interaction of the SmHT:LgHT in the complemented complex, effectively creating a novel high affinity version of split HaloTag. In this case, the luminescence technology is not used other than to bring the split HaloTag® pieces together if the user only desires to have a spontaneously completing split HaloTag® system for targeting chloroalkanes to a tagged protein target. In another embodiment the HiBiT component of the tandem peptide tag will be detected with LgBiT alone (i.e., not fused to LgHT). In situations where there is excess LgBiT-LgHT detector in the cell, it may be possible to amplify signal. This could happen if one molecule of detector binds and forms a complex to the dual peptide tag and the LgHT sequence becomes fluorescently-labeled but then dissociates from the dual peptide tag. This would allow for a previously non-labeled LgBiT-LgHT to bind to the dual peptide tag and become labeled.

[0317] In some embodiments of the present technology utilizing a LgHT-LgBiT polypeptide or variants thereof, since such a fusion imparts a versatile range of functionalities toward the detection and manipulation of the tagged target protein, the LgHT-LgBiT fusion is primarily envisioned in a configuration that fuses the two proteins at their termini. In some embodiments, the properties and performance of the LgHT-LgBiT fusion could be further optimized through modification of the linker between them and their relative orientation (LgHT-LgBiT versus LgBiT-LgHT). Other potential configurations include circular permutation of one or both proteins in the fusion or insertion of one sequence/permuted sequence inside the other. The latter is similar to our work creating “chimeras” between HaloTag and NanoLuc/LgBiT/LgTrip, where the luminescence protein is inserted within HaloTag, providing the benefit of a close proximity and specific geometry between their respective substrate binding sites resulting in exceptionally efficient energy transfer for BRET. A “split chimera” version using LgHT-LgBiT could be similarly configured, potentially providing the correct orientation to still form a complementation complex with the SmHT-HiBiT peptide tag.

[0318] Some advantages of the invention configuring the LgHT-LgBiT (or variants thereof) into a fusion polypeptide include its introduction as a single detection reagent, compatibility with all NanoLuc® and HaloTag® substrates/ligands, sequential or simultaneous luminescence/fluorescence measurement, and multiple different measurements of a tagged target (quantification, interaction, localization, etc.). As a single detection reagent, the LgHT-LgBiT fusion polypeptide (or variants thereof) can be delivered into an assay or cell as a purified protein, encoded on a plasmid or mRNA, or uniformly expressed from the chromosome in a stable or CRISPR cell line. As a purified protein, it can be fused or conjugated to a solid support/bead/surface or other protein, such as an antibody. The latter is advantageous for biochemical or immunoassays where the LgHT-LgBiT (or variants thereof) would be conjugated to an antibody and configured into a detection reagent that relies on recognition of the antibody target in an in vitro or diagnostic format.

[0319] The compatibility of the LgHT-LgBiT polypeptide (or variants thereof) with all NanoLuc® substrates and HaloTag® ligands provides exceptional versatility in the mode of detection (luminescence or fluorescence), emission wavelengths (UV to IR), and functionality (non-fluorescent HaloTag® ligands). An example application would be an animal model such as a mouse expressing the LgHT-LgBiT detection polypeptide (or variants thereof), in which introduction of a protein target tagged with the SmHT-HiBiT tag (e.g. through viral infection where small tags encoded on their genome are advantageous) enables the sensitive detection offered with low-background luminescence to quantify the target protein's abundance while the far-red, brain-permeable fluorescent HaloTag® ligands enable sophisticated neuronal imaging at another wavelength (with the potential for BRET). This example highlights the tradeoffs currently being made by researchers in animal imaging, where one detection technology has some but not all benefits that are solved by embodiments herein which enable both in a single model system without changing tags or reengineering cells/animals/hosts. For animal imaging, already existing studies showing targeted PET, SPECT, sensors, and MRI highlight the diversity of applications. Each of these can be combined with bioluminescence imaging with the tandem peptide tag.

[0320] In some embodiments, the systems herein find use with non-fluorescent HaloTag® ligands. For example, biotin chloroalkane ligands allow capture of dual-tagged target proteins. Another application is in the targeting of molecules for inducing protein proximity, where a particularly relevant example is targeted chimeras molecules (PROTACs, LyTACs, PhosTACs, AuTACs, etc.) and molecular glues. Since these molecules can be configured as chloroalkanes (i.e., HaloPROTACs), they offer a specific use case where this invention is novel. For example, a target protein tagged with SmHT-HiBiT can be monitored in real time for abundance with the luminescence activity of the LgHT-LgBiT detector, whereupon binding of a HaloPROTAC to the complex through the SmHT:LgHT interaction initiates recruitment of an E3 ligase, causing ubiquitination and degradation by the proteosome and subsequent decrease in the real-time luminescence signal. This highlights the simultaneous use of both split NanoLuc® and split HaloTag® capabilities of the technology in a way not currently possible with them separately. A HaloTag®-HiBiT tag could be used for this purpose, although there are examples of increased target protein expression and stability when the full-length HaloTag is used as fusion tag, which is particularly detrimental under conditions where the stability/degradation of the target is being studied, in addition to the need to add a much larger HaloTag®-HiBiT tag onto their target protein. Therefore, the capability of the SmHT-HiBiT to be minimally disruptive to the protein target while also enabling its manipulation through complementation with the LgHT-LgBiT detector is specific to this invention.

[0321] In some embodiments, the technologies herein, specifically the fluorescence output component, provides a more efficient workflow for engineering HiBiT-tagged endogenous gene cell lines through the use of cell sorting. The ability to sort positive cells (tagged gene of interest) in high-throughput could greatly diminish the amount of time and effort that goes into manually screening for positive pools or clones. This could be particularly impactful when working with targets that are difficult to modify using CRISPR editing or when working with difficult to propagate cells such as primary cells. A fluorescence ligand can be used for screening cells or pools of cells by fluorescence-activated cell sorting, and then when a clone or pool of clones is identified either the same ligand or a different ligand can be used for actual imaging experiments on cells. In some embodiments, the systems herein find use with various surface display technologies.

[0322] In certain embodiments, biomolecules, such as proteins/DNA/RNA, are immobilized to the surfaces of cells, microbeads, or other surfaces through a fusion to the DualTag or Dual Detector, taking advantage of the system's high affinity and very low rate of dissociation. In some embodiments, the displaying cells or microbeads are used as a platform for high-throughput methods of capture or measurement such as magnetic bead sorting or flow cytometry, respectively, to measure binding or modification of the fused target analyte of interest. Examples of target analytes include examples of various biomolecules such as protein variants, linker variants, small molecules, nucleic acids, or binding proteins. Such embodiments further allow for the concurrent employment of additional reporters, stains, tags, or markers on the surface of the cells or microbeads to achieve multiplex detection of signals on the surface, such as in the case of protein:protein interaction between two tagged/labeled species. The distinctive feature of the systems herein is provided not due to the high affinity interaction and slow dissociation of the tandem detector for the tandem peptide tag, but also in the capability to facilitate fluorescence detection via labeling with a fluorescent HaloTag® ligand, where a fluorescence signal is particularly useful for measurement with high-speed cell or bead cytometry or sorting applications.

[0323] In some embodiments, the capacity of the systems herein to facilitate cell surface display finds use in biological assays, for example, for monitoring cell surface receptors. Cell surface receptors, such as GPCRs, are valuable drug targets and heavily utilized for manipulating cell behavior and physiology. These receptors can be genetically modified to express the be linked to a tandem peptide tag herein. The small size and minimum expectation of perturbation of the tandem peptide tags herein allows for the display of the tandem tag externally on the cell surface or internally into the cytoplasm. Upon binding with a tandem detector herein, such systems enables both luminescence and fluorescence detection modalities. Depending on the orientation of the tag, either internal or external, various assays are enabled. If displayed externally, the systems herein can be used to measure receptor interactions, internalization, or dimerization when a tandem detector is provided exogenously as a purified protein, for example. If displayed internally, the systems herein can be used to measure post-translational modifications, protein-protein, and cell signaling pathways when, for example, a tandem detector is co-expressed inside the cell.

[0324] In some embodiments, the systems herein find use in monitoring dynamic cell entry. The entry into a cell of a tandem peptide tagged molecule and/or a tandem detector via a biological mechanism can be measured in the presence of the complementing fragment. An illustrative use involves viral infection, where the engineering of a tandem peptide tag onto a viral element would not compromise the formation of viral particles due to the tag's minimal size. This engineered virus, upon infecting a host cell that expresses a tandem detector, facilitates the release and subsequent detection of the tandem-tagged fusion protein as the tagged viral protein is released and associates with the tandem detector inside the cell. This technology provides for the real-time observation of viral entry into host cells using fluorescence imaging, including the application of HaloTag® ligands that specifically label the tandem peptide tag post-entry. Furthermore, such systems provide a drug discovery tool in the screening of neutralizing anti-viral drugs or antibodies by measuring the neutralization of viral entry, by reporting on the differential entry and localization of viral proteins inside the cell under treatment conditions. This use could also be further extended to study the mechanisms of action of such viral-neutralizing drugs, including their kinetic differences, potency effects, intracellular particle localization, and structural variances in virus-receptor complexes through the various fluorescence and luminescence detection assay formats available with the technology.

[0325] In some embodiments, the systems herein find use are molecular recorders through their self-labelling functionality. Molecular recorders are important tools for tracking transient cellular events over time. This capability is critical for understanding the dynamic processes that govern cell function, such as signaling pathways, gene expression changes, and physiological responses to environmental stimuli. Molecular recorders, like HaloTag and systems herein, offer advantages by converting transient cellular activities into permanent, detectable marks that can be analyzed subsequently. This separation of recording from analysis allows for the study of cellular activities with both high temporal resolution and across large populations of cells, providing a comprehensive view of cellular processes that were previously difficult or impossible to observe. Unlike enzymes that continuously convert substrates to generate a signal, molecular recorders offer a ‘write-once’ mechanism that marks the presence of a specific activity without the need for ongoing substrate turnover. This feature minimizes background noise and allows for the accumulation of signal only in the presence of the targeted activity, improving the specificity and sensitivity of detection. Furthermore, molecular recorders can be designed to respond to a variety of cellular events, providing flexibility that is not always possible with traditional enzymatic reporters. The use of distinguishable substrates with molecular recorders enables the sequential recording of multiple activities within the same cells or tissues, a feat difficult to achieve with conventional enzymatic reporters due to their continuous activity and signal production.

[0326] In the context of neuroscience, monitoring calcium levels in neurons is critical for understanding neuronal activity as calcium ions play a key role in transmitting signals within and between neurons. A specific application of systems herein in this area involves creating a fusion protein between a tandem peptide tag and a calcium-binding protein, such as calmodulin. Since the tandem peptide tag is a small tag, it can be introduced using CRISPR genome editing to the endogenous calmodulin locus. This fusion protein is then be expressed in neurons of interest along with a tandem detector, allowing labeling of the protein with a fluorescent HaloTag® ligand that is sensitive to calcium ions. Following the application of different stimuli (e.g., neurotransmitters or electrical stimulation) that induce calcium influx in neurons, live-cell imaging is used to monitor the fluorescence intensity of the HaloTag® ligand enabling quantitative measurement of intracellular calcium levels over time. This approach enables the mapping of calcium dynamics in response to specific stimuli, providing insights into the neural mechanisms underlying neuronal activation and communication.

[0327] Visualization and tracking of vesicle release in response to neuronal activation is an important aspect of neurotransmitter research. By creating a fusion between a tandem peptide tag and a protein involved in neurotransmitter vesicle docking or release, such as Synaptotagmin, labeling of vesicles responsible for neurotransmitter release is provided. Following the application of stimuli that trigger neuronal firing (such as pharmacological agents or optogenetic activation), time-lapse fluorescence microscopy can be used to observe the dynamics of vesicle fusion and neurotransmitter release in the presence of a tandem detector given its high affinity and labeling dependence for the tandem peptide tag. This method provides a direct way to study the temporal and spatial patterns of neurotransmitter release during different behavioral states or in response to various environmental cues, offering deeper understanding of the synaptic mechanisms contributing to behavior and neural circuit function.

[0328] Signal transduction pathways play pivotal roles in directing the differentiation of, for example, stem cells or organoids into specific tissue types. Utilizing a tandem peptide tag to monitor these pathways can reveal how signaling dynamics influence cell fate decisions during development under endogenous conditions where a small tag provides advantages in minimizing impact of its fusion partner. A specific application involves fusing a tandem peptide tag to key signaling molecules within a pathway, such as a receptor or transcription factor that is crucial for the differentiation of a particular cell type. For example, fusion of a tandem peptide tag to β-catenin, a central mediator of Wnt signaling, allows for monitoring the mechanisms underlying the differentiation of mesenchymal stem cells into osteoblasts, which is regulated by the Wnt signaling pathway. By introducing this construct into mesenchymal stem cells and using specific, fluorescently labeled HaloTag® ligands, the activation and nuclear localization of β-catenin is visualized in real-time using a fluorescence microscopy. This approach allows for the observation of how Wnt signaling fluctuates and orchestrates the differentiation process, providing insights into the molecular mechanisms driving tissue specification.

[0329] In some embodiments, systems herein find use in investigating tumor heterogeneity and metastatic potential. Tumor heterogeneity refers to the diversity of tumor cells within a single tumor, which can significantly influence its metastatic potential and response to treatment. Using the systems herein, researchers can label and track specific populations of tumor cells to study their proliferation, migration, and invasion abilities. A specific application involves tagging cancer stem cells (CSCs) known to play a pivotal role in tumor growth and metastasis. Tandem peptide tags herein are linked to surface markers unique to these cells. These CSCs are then introduced into a tumor model expressing a tandem detector, allowing researchers to track their behavior in vivo using fluorescent HaloTag® ligands. This approach enables the observation of how CSCs contribute to tumor heterogeneity, metastasis, and resistance to therapy, providing critical insights into the underlying mechanisms of cancer progression and identifying potential targets for intervention.

[0330] In some embodiments, the systems herein find use in monitoring dynamics of the tumor microenvironment. The tumor microenvironment plays a crucial role in cancer development and progression, consisting of a complex network of tumor cells, immune cells, stromal cells, and extracellular matrix components. A practical application includes tagging proteins involved in the crosstalk between tumor cells and immune cells within the microenvironment. For example, fusion of a tandem peptide tag herein with a cytokine or chemokine secreted by tumor cells that recruits T-regulatory cells, enables labeling and monitoring of the recruitment process of the T-regulatory cells to tumor cells displaying a tandem detector in real-time. Since T-regulatory cells can suppress anti-tumor immune responses, this method allows for the visualization of the mechanisms involved in tumor cell modulation of the immune environment to their advantage. Tracking these interactions could reveal new therapeutic targets aimed at disrupting the protective niche created by tumor cells in the tumor microenvironment, enhancing the efficacy of immunotherapies.

[0331] In some embodiments, the systems herein find use for protein tagging, capture, and analysis. A practical application of the systems herein includes a tandem peptide tag fused to a target protein of interest, maintaining the functional versatility of the original, monomeric HaloTag®, but requiring addition of a complementary sequence for active HaloTag® formation. In such a system, the tagged target protein can be overexpressed and captured in the presence of a dual detector reagent that includes the complementary component of the binary HaloTag (HT). Capture can then be accomplished using either a biotin HaloTag® ligand with a streptavidin surface or directly onto a chloroalkane surface. This method facilitates efficient purification of the target protein or pull-down of associated prey proteins, which could then identified by mass spectrometry. This application highlights the tandem tag/detector system's capability to provide detailed protein interaction studies and purification processes, similar to those possible with the full-length HaloTag®. However, the tandem peptide tag represents a much smaller tag, potentially reducing the risk of compromising the target protein's functionality. An additional advantage of this application is that it leaves the target protein tagged with HiBiT, enabling its detection, monitoring, and quantification during subsequent analyses.

### EXPERIMENTAL

### Example 1

[0332] Experiments were conducted during development of embodiments herein to demonstrate that the SmHT and HiBiT tags were compatible with each other by fusing them together into a single peptide tag (e.g., SmHT-HiBiT) and measuring activity in facilitated complementation assays. The tags were fused to the C-terminus of FKBP and facilitated complementation with a FRB fusion to the C-terminus of a LgHT variant, HaloTag[23-297]. In the presence of Rapamycin, the FKBP-SmHT-HiBiT fusion was similarly capable of showing a complementation-dependent increase in JF646 HaloTag® ligand labeling as the control with only FKBP-SmHT (no HiBiT), indicating that the presence of the HiBiT tag in this manner did not interfere with split HaloTag® function. (FIG. 2).

[0333] In the same system, a different LgHT variant, HaloTag[22-297](Q145H+P154) was used and exhibited similar performance with or without the HiBiT appended to the C-terminus of the FKBP-SmHT fusion (FIG. 3). This particular variant of LgHT has improved expression and stability and confirmed that the properties of the LgHT can be changed and maintain performance in this assay.

[0334] The fold response of the HaloTag[23-297]—FRB to Rapamycin was calculated with and without the HiBiT present on the FKBP-SmHT. The presence of the HiBiT tag did not interfere with complementation (FIG. 4).

[0335] Similarly, the fold response was calculated for the more well expressed and stable HaloTag[22-297](Q145H+P154)-FRB to Rapamycin with and without the HiBiT present on the FKBP-SmHT. The presence of the HiBiT tag did not interfere with complementation (FIG. 5).

[0336] Experiments were conducted during development of embodiments herein to determine if the split NanoLuc® (NanoBiT) components retained function in the dual configuration as well. Purified LgBiT could be added to the lysate containing the FKBP-SmHT-HiBiT fusion and high levels of luminescence activity that was dependent on the presence of the HiBiT tag in the reaction was detected (FIG. 6). In this experiment, there is no LgHT present as it was used to confirm that the NanoBiT technology was still functional when the HiBiT was configured in the FKBP-SmHT-HiBiT fusion.

[0337] Experiments were conducted during development of embodiments herein to demonstrate the function of the LgHT-LgBiT reporter polypeptide for spontaneous complementation of the split HaloTag sequences and increase in activity. As a control, the LgHT-FRB fusions were compared to LgHT-LgBiT fusions in a facilitated complementation assay. For this experiment, LgHT variant HaloTag[22-297](M2F) was used, which has a high fold response in the assay due to its lower background (non-facilitated) activity levels. The FKBP-SmHT fusion was also compared to the FKBP-SmHT-HiBiT fusion. The data shows that when LgHT is fused to FRB, it requires the presence of Rapamycin to facilitate its complementation to FKBP-SmHT and FKBP-SmHT-HiBiT through the FRB:FKBP interaction (FIG. 7). When LgHT is fused to LgBiT, complementation of the split HaloTag® sequences occurs in a Rapamycin-independent manner, with the (−) Rapamycin conditions showing similar fluorescence to (+) Rapamycin conditions. The fluorescence response was also dependent on HiBiT fusion to the FKBP-SmHT, indicating the specificity of the configuration to both the LgBiT and HiBiT components.

[0338] Experiments were conducted during development of embodiments herein to test another LgHT variant fused to LgBiT, HaloTag[22-297](Q145H+P154R), which typically shows higher expression and stability, but lower fold response in this assay due to its higher background activity. The results are similar to those of the previous LgHT(M2F) variant, in which we demonstrate the ability of the LgHT-LgBiT fusion to spontaneously complement (independent of Rapamycin) the split HaloTag® components of the configuration and that it is dependent on the presence of both LgBiT and HiBiT fusions (FIG. 8). Due to the high expression of this mutant in E. coli lysates, higher fluorescence intensity was achieved.

[0339] Experiments were conducted during development of embodiments herein to demonstrate the measurement of luminescence of the complemented LgHT-LgBiT polypeptide (two different LgHT variants) in complex with the FKBP-SmHT-HiBiT in the same reaction following the measurement of its fluorescence. Reactions from FIGS. 7 and 8, in which the split HaloTag® activity of the complex was measured using labeling with JF646 HaloTag® ligand, were diluted into a NanoGlo® assay buffer containing furimazine, and the luminescence measured. The data shows that the maximum luminescence is observed when the LgBiT and HiBiT are present in the configurations, about 100-fold higher than the same containing LgHT-LgBiT, but no HiBiT on the FKBP-SmHT fusion (FIG. 9). This supports the capability of this technology to measure both luminescence and fluorescence within the complementation complex simultaneously in the same homogeneous reaction mixture without any need for washing, enrichment, or purification.

[0340] Experiments were conducted during development of embodiments herein to demonstrate that use of a synthetic peptide of the SmHT-HiBiT tag (without any other fusions) to form complementation complexes with two different LgHT-LgBiT variants in E. coli lysates. As the concentration of the synthetic SmHT-HiBiT peptide added to the reaction was increased, the high affinity interaction between the HiBiT:LgBiT facilitates the complementation of the split HaloTag components, resulting in increased labeling and fluorescence with JF646 HaloTag® ligand (FIG. 10). The data demonstrates the direct interaction between the two polypeptides is sufficient to observe increased split HaloTag® activity, without the need for fusion partners (such as FRB or FKBP).

[0341] Experiments were conducted during development of embodiments herein to measure the luminescence activity of the complex at increasing concentrations of a synthetic SmHT-HiBiT peptide added to E. coli lysates expressing two different LgHT-LgBiT variant polypeptides (FIG. 11). The reactions show similar performance of the NanoBiT components of the complex regardless of their respective LgHT fusion partner. It also demonstrates that high luminescence is capable in an assay format using synthetic peptide and no other fusion partners (FRB or FKBP), indicating that the LgBiT:HiBiT interaction is sufficient for high affinity facilitation of the interaction and the presence of the LgHT or SmHT components of the complex do not interfere with NanoBiT performance.

### Example 2

### HaloTag[3-19]-HiBiT Configuration and Mutation Screening in E. coli Lysates

### Effects of Varying Internal Linker Length and Orientation of HaloTag[3-19]-HiBiT as C-Terminal FKBP Fusions on Activity in Lysates.

[0342] Experiments were conducted during development of embodiments herein demonstrating that HaloTag[3-19]-HiBiT variants are functional with varying Gly-Ser linker lengths between the HaloTag[3-19] and HiBiT sequences (FIG. 12). The variants are also functional in both orientations (HaloTag[3-19]-HiBiT and HiBiT-HaloTag[3-19]) as C-terminal fusions to FKBP, and when complemented with LgBiT alone or with either HaloTag[22-297](M2F)-12×Gly/Ser-LgBiT or LgBiT-12×Gly/Ser-HaloTag[22-297](M2F).

[0343] Experiments were conducted during development of embodiments herein demonstrating that HaloTag[3-19]-HiBiT variants are functional with various flexible linker lengths between the HaloTag[3-19] and HiBiT peptide sequences (FIG. 13). The variants are also functional in both orientations (HaloTag[3-19]-HiBiT and HiBiT-HaloTag[3-19]) as C-terminal fusions to FKBP and when complemented with HaloTag[22-297](M2F)-12×Gly/Ser-LgBiT or LgBiT-12×Gly/Ser-HaloTag[22-297](M2F).

[0344] Experiments were conducted during development of embodiments herein demonstrating that HaloTag[3-19]-HiBiT variants are functional with varying Gly-Ser linker lengths between the HaloTag[3-19] and HiBiT sequences (FIG. 14). The HaloTag[3-19]-HiBiT variants are also functional in both orientations (HaloTag[3-19]-HiBiT and HiBiT-HaloTag[3-19]) as C-terminal fusions to FKBP and when complemented with HaloTag[22-297](M2F)-12×Gly/Ser-LgBiT or LgBiT-12×Gly/Ser-HaloTag[22-297](M2F).

### Effects of Varying Internal Linker Length and Orientation of HaloTag[3-19]-HiBiT as N-Terminal FKBP Fusions on Activity in Lysates.

[0345] Experiments were conducted during development of embodiments herein demonstrating that HaloTag[3-19]-HiBiT variants are functional with varying Gly-Ser linker lengths between the HaloTag[3-19] and HiBiT sequences (FIG. 15). The variants are also functional in both orientations (HaloTag[3-19]-HiBiT and HiBiT-HaloTag[3-19]) as N-terminal fusions to FKBP, and when complemented with LgBiT alone, HaloTag[22-297](M2F)-12×Gly/Ser-LgBiT, or LgBiT-12×Gly/Ser-HaloTag[22-297](M2F).

[0346] Experiments were conducted during development of embodiments herein demonstrating that HaloTag[3-19]-HiBiT variants are functional with varying Gly-Ser linker lengths between the HaloTag[3-19] and HiBiT sequences (FIG. 16). The variants are also functional in both orientations (HaloTag[3-19]-HiBiT and HiBiT-HaloTag[3-19]) as N-terminal fusions to FKBP and when complemented with HaloTag[22-297](M2F)-12×Gly/Ser-LgBiT or LgBiT-12×Gly/Ser-HaloTag[22-297](M2F).

[0347] Experiments were conducted during development of embodiments herein demonstrating that HaloTag[3-19]-HiBiT variants are functional with varying Gly-Ser linker lengths between the HaloTag[3-19] and HiBiT sequences (FIG. 17). The HaloTag[3-19]-HiBiT variants are also functional in both orientations (HaloTag[3-19]-HiBiT and HiBiT-HaloTag[3-19]) as N-terminal fusions to FKBP and when complemented with HaloTag[22-297](M2F)-12×Gly/Ser-LgBiT or LgBiT-12×Gly/Ser-HaloTag[22-297](M2F).

### Effects of Varying Linker Length and Composition of HaloTag[3-19]-HiBiT as C-Terminal FKBP Fusions on Activity in Lysates.

[0348] Experiments were conducted during development of embodiments herein demonstrating that HaloTag[3-19]-HiBiT variants are functional with varying Gly-Ser and other composition (rigid) linker lengths between the HaloTag[3-19] and HiBiT sequences (FIG. 18). The variants are also functional in both orientations (HaloTag[3-19]-HiBiT and HiBiT-HaloTag[3-19]) as C-terminal fusions to FKBP, and when complemented with LgBiT alone, HaloTag[22-297](M2F)-12×Gly/Ser-LgBiT, or LgBiT-12×Gly/Ser-HaloTag[22-297](M2F).

[0349] Experiments were conducted during development of embodiments herein demonstrating that HaloTag[3-19]-HiBiT variants are functional with varying flexible Gly-Ser and rigid linker lengths between the HaloTag[3-19] and HiBiT sequences (FIG. 19). The variants are also functional in both orientations (HaloTag[3-19]-HiBiT and HiBiT-HaloTag[3-19]) as C-terminal fusions to FKBP and when complemented with HaloTag[22-297](M2F)-12×Gly/Ser-LgBiT or LgBiT-12×Gly/Ser-HaloTag[22-297](M2F).

Effects of Varying Linker Length Between FKBP and HaloTag[3-19]-HiBiT C-Terminal Fusions on Activity in E. coli Lysates.

[0350] Experiments were conducted during development of embodiments herein demonstrating that HaloTag[3-19]-HiBiT variants are functional with varying Gly-Ser linkers separating the tandem peptide tag from its fusion partner, FKBP (FIG. 20). The variants are also functional when complemented with LgBiT alone, HaloTag[22-297](M2F)-12×Gly/Ser-LgBiT, or LgBiT-12×Gly/Ser-HaloTag[22-297](M2F).

[0351] Experiments were conducted during development of embodiments herein demonstrating that HaloTag[3-19]-HiBiT variants are functional in fluorescence assays with varying Gly-Ser linkers separating the tandem peptide tag from its fusion partner, FKBP (FIG. 21). The variants are also functional when complemented with either HaloTag[22-297](M2F)-12×Gly/Ser-LgBiT or LgBiT-12×Gly/Ser-HaloTag[22-297](M2F).

### Effects of Varying Linker Length Between N-Terminal HaloTag[3-19]-HiBiT and FKBP Genetic Fusions on Activity in Lysates.

[0352] Experiments were conducted during development of embodiments herein demonstrating that HaloTag[3-19]-HiBiT variants are functional with varying Gly-Ser linkers separating the tandem peptide tag from its fusion partner, FKBP (FIG. 22). The variants are also functional when complemented with LgBiT alone, HaloTag[22-297](M2F)-12×Gly/Ser-LgBiT, or LgBiT-12×Gly/Ser-HaloTag[22-297](M2F).

[0353] Experiments were conducted during development of embodiments herein demonstrating that HaloTag[3-19]-HiBiT variants are functional in fluorescence assays with varying Gly-Ser linkers separating the tandem peptide tag from its fusion partner, FKBP (FIG. 23). The variants are also functional when complemented with either HaloTag[22-297](M2F)-12×Gly/Ser-LgBiT or LgBiT-12×Gly/Ser-HaloTag[22-297](M2F).

### Effects of HaloTag[3-19] Truncations on HaloTag[3-19]-HiBiT Activity in Lysates.

[0354] Experiments were conducted during development of embodiments herein demonstrating that HaloTag[3-19]-HiBiT variants are functional in luminescence assays with HaloTag[3-19] truncations (FIG. 24). The variants are also functional when complemented with LgBiT alone, HaloTag[22-297](M2F)-12×Gly/Ser-LgBiT, or LgBiT-12×Gly/Ser-HaloTag[22-297](M2F).

[0355] Experiments were conducted during development of embodiments herein demonstrating that HaloTag[3-19]-HiBiT variants are functional in fluorescence assays with HaloTag[3-19] truncations (FIG. 25). The variants are also functional when complemented with either HaloTag[22-297](M2F)-12×Gly/Ser-LgBiT or LgBiT-12×Gly/Ser-HaloTag[22-297](M2F).

### Effects of HiBiT Mutations on HaloTag[3-19]-HiBiT Activity in Lysates.

[0356] Experiments were conducted during development of embodiments herein demonstrating that HaloTag[3-19]-HiBiT variants with HiBiT mutations are functional in luminescence assays (FIG. 26). The variants are also functional when complemented with LgBiT alone, HaloTag[22-297](M2F)-12×Gly/Ser-LgBiT, or LgBiT-12×Gly/Ser-HaloTag[22-297](M2F).

[0357] Experiments were conducted during development of embodiments herein demonstrating that HaloTag[3-19]-HiBiT variants with HiBiT mutations are functional in fluorescence assays (FIG. 27). The variants are also functional when complemented with either HaloTag[22-297](M2F)-12×Gly/Ser-LgBiT or LgBiT-12×Gly/Ser-HaloTag[22-297](M2F).

### Example 3

### HaloTag[3-19]-HiBiT Configuration and Mutation Screening with Synthetic Peptides

### Luminescence Activity of HaloTag[3-19]-HiBiT Synthetic Peptide Variants.

[0358] Experiments were conducted during development of embodiments herein demonstrating that HaloTag[3-19]-HiBiT variant synthetic peptides with one or more sequence changes are still functional in complementing LgBiT-6×His to enhance luminescence signal (FIG. 28).

[0359] Experiments were conducted during development of embodiments herein demonstrating that HaloTag[3-19]-HiBiT synthetic peptides with one or more sequence changes are still functional in complementing HaloTag[22-297](M2F+K140E)-12×Gly/Ser-LgBiT-6×His to enhance luminescence signal (FIG. 29).

[0360] Experiments were conducted during development of embodiments herein demonstrating that HaloTag[3-19]-HiBiT synthetic peptides with one or more sequence changes are still functional in complementing HaloTag[22-297](M2F+K140E)-12×Gly/Ser-LgBiT-6×His to enhance luminescence signal (FIG. 30).

[0361] Experiments were conducted during development of embodiments herein demonstrating that HaloTag[3-19]-HiBiT variants synthetic peptides with sequence changes or additional linker residues between HaloTag[3-19] and HiBiT are still functional in complementing HaloTag[22-297](M2F)-12×Gly/Ser-LgBiT-6×His to enhance luminescence signal (FIG. 31).

[0362] Experiments were conducted during development of embodiments herein demonstrating that HaloTag[3-19]-HiBiT variants synthetic peptides with one or more sequence changes are still functional in complementing HaloTag[22-297](M2F)-12×Gly/Ser-LgBiT-6×His to enhance luminescence signal (FIG. 32). Peptide 1061 contains a HaloTag[3-19] sequence in which all 17 residues have been mutated, and the peptide is still functional.

### Fluorescence Activity of HaloTag[3-19]-HiBiT Synthetic Peptide Variants.

[0363] Experiments were conducted during development of embodiments herein demonstrating that HaloTag[3-19]-HiBiT variant synthetic peptides with one or more sequence changes are still functional in complementing HaloTag[22-297](M2F+K140E)-12×Gly/Ser-LgBiT-6×His to enhance fluorescence signal (FIG. 33).

[0364] Experiments were conducted during development of embodiments herein demonstrating that HaloTag[3-19]-HiBiT variant synthetic peptides with one or more sequence changes are still functional in complementing HaloTag[22-297](M2F+K140E)-12×Gly/Ser-LgBiT-6×His to enhance fluorescence signal (FIG. 34).

[0365] Experiments were conducted during development of embodiments herein demonstrating that HaloTag[3-19]-HiBiT variant synthetic peptides with one or more sequence changes are still functional in complementing HaloTag[22-297](M2F+K140E)-12×Gly/Ser-LgBiT-6×His to enhance fluorescence signal (FIG. 35).

[0366] Experiments were conducted during development of embodiments herein demonstrating that HaloTag[3-19]-HiBiT variant synthetic peptides with one or more sequence changes are still functional in complementing HaloTag[22-297](M2F+K140E)-12×Gly/Ser-LgBiT-6×His to enhance fluorescence signal (FIG. 36).

### Fluorescence Activity of HaloTag[3-19] Synthetic Peptide Variants.

[0367] Experiments were conducted during development of embodiments herein demonstrating that HaloTag[3-19] synthetic peptides with a single residue deletion and/or one or more sequence changes are still functional in complementing HaloTag[22-297](M2F)-12×Gly/Ser-LgBiT and enhancing fluorescence intensity of HaloTag[22-297](M2F)-12×Gly/Ser-LgBiT bound to JF646 HaloTag ligand (FIG. 37). Every residue in peptide 1065 has been changed from the original HaloTag[3-19] sequence and is still a functional HaloTag[3-19].

[0368] Experiments were conducted during development of embodiments herein demonstrating that HaloTag[3-19] synthetic peptides with two or more sequence changes are still functional in complementing HaloTag[22-297](M2F)-12×Gly/Ser-LgBiT and enhancing fluorescence intensity of HaloTag[22-297](M2F)-12×Gly/Ser-LgBiT bound to JF646 HaloTag® ligand (FIG. 38).

[0369] Experiments were conducted during development of embodiments herein demonstrating that HaloTag[3-19] synthetic peptides with one or more sequence changes are still functional in complementing HaloTag[22-297](M2F)-12×Gly/Ser-LgBiT and enhancing fluorescence intensity of HaloTag[22-297](M2F)-12×Gly/Ser-LgBiT bound to JF646 HaloTag® ligand.

[0370] Experiments were conducted during development of embodiments herein demonstrating that HaloTag[3-19] synthetic peptides with one or more sequence changes are still functional in complementing HaloTag[22-297](M2F)-12×Gly/Ser-LgBiT and enhancing fluorescence intensity of HaloTag[22-297](M2F)-12×Gly/Ser-LgBiT bound to JF646 HaloTag® ligand (FIG. 40).

### Example 4

### Binding Kinetics of HaloTag[22-297]-12×Gly/Ser-LgBiT Variants with Synthetic Peptides

[0371] Experiments were conducted during development of embodiments herein demonstrating that the dissociation of HaloTag[3-19](12R)-4×Gly/Ser-VS-HiBiT from HaloTag[22-297](M2F+F148M+V177E)-12×Gly/Ser-LgBiT-6×His is very slow, as there is almost no decrease in shift during the dissociation phase of the experiment (FIG. 41).

[0372] Table 1 includes binding measurements for HaloTag[3-19]-HiBiT variant synthetic peptides and HaloTag[22-297]-12×Gly/Ser-LgBiT-6×His variants and includes a comparison to binding measurements for VS-HiBiT and LgBiT-6×His. The NA designation in the k_{off} column represents dissociation that is too slow for the instrument to measure (limit 10⁶ l/s), which also prohibits the calculation of a K_{D}. These results demonstrate that HaloTag[3-19]-HiBiT variants have very slow dissociation from HaloTag[22-297]-12×Gly/Ser-LgBiT-6×His variants and LgBiT-6×His alone.

TABLE 1
Binding measurements for polypeptide reporter/synthetic peptide complementation from biolayer
interferometry experiments. All peptides are biotinylated at the N-terminus for immobilization
onto streptavidin probes. Binding experiments were performed in PBST at 25° C.

| Peptide | Polypeptide reporter | K_{off} (1/s) | Kₒₙ (1/Ms) | K_{D} (M) |
|---|---|---|---|---|
| HaloTag[3-19](I2R)- | HaloTag[22-297](M2F)-12xGly/Ser- | 8.34E−005 | 5.19E+004 | 1.61E−009 |
| 4xGly/Ser-VSHiBiT | LgBiT-3xGly/Ser-6xHis | | | |
| HaloTag[3-19](I2R)- | HaloTag[22-297](M2F + K140E)- | 3.26E−005 | 7.00E+004 | 4.66E−010 |
| 4xGly/Ser-VSHiBiT | 12xGly/Ser-LgBiT-3xGly/Ser-6xHis | | | |
| HaloTag[3-19](I2R)- | HaloTag[22-297](M2F + D53G + V177E)- | 4.09E−005 | 6.13E+004 | 6.69E−010 |
| 4xGly/Ser-VSHiBiT | 12xGly/Ser-LgBiT-3xGly/Ser-6xHis | | | |
| HaloTag[3-19](I2R)- | HaloTag[22-297](M2F + K140E)- | 4.56E−005 | 6.67E+004 | 6.84E−010 |
| 4xGly/Ser-VSHiBiT | 12xGly/Ser-LgBiT-3xGly/Ser-6xHis | | | |
| HaloTag[3-19](G3K)- | HaloTag[22-297](M2F + K140E)- | 1.93E−005 | 7.30E+004 | 2.64E−010 |
| 4xGly/Ser-VSHiBiT | 12xGly/Ser-LgBiT-3xGly/Ser-6xHis | | | |
| HaloTag[3-19](G5R)- | HaloTag[22-297](M2F + K140E)- | NA | 8.53E+004 | NA |
| 4xGly/Ser-VSHiBiT | 12xGly/Ser-LgBiT-3xGly/Ser-6xHis | | | |
| HaloTag[3-19](D9R)- | HaloTag[22-297](M2F + K140E)- | 1.09E−005 | 8.66E+004 | 1.26E−010 |
| 4xGly/Ser-VSHiBiT | 12xGly/Ser-LgBiT-3xGly/Ser-6xHis | | | |
| HaloTag[3-19](E14K)- | HaloTag[22-297](M2F + K140E)- | NA | 1.08E+005 | NA |
| 4xGly/Ser-VSHiBiT | 12xGly/Ser-LgBiT-3xGly/Ser-6xHis | | | |
| HaloTag[3-19](L16R)- | HaloTag[22-297](M2F + K140E)- | NA | 7.79E+004 | NA |
| 4xGly/Ser-VSHiBiT | 12xGly/Ser-LgBiT-3xGly/Ser-6xHis | | | |
| VSHiBiT | HaloTag[22-297](M2F + F148M + V177E)- | 6.28E−004 | 2.61E+005 | 2.40E−009 |
| | 12xGly/Ser-LgBiT-3xGly/Ser-6xHis | | | |
| VSHiBiT | LgBiT-6xHis | 9.31E−004 | 1.84E+005 | 5.06E−009 |
| HaloTag[3-19](I2R)- | HaloTag[22-297](M2F + F148M + V177E)- | 2.75E−005 | 5.40E+004 | 5.09E−010 |
| 4xGly/Ser-VSHiBiT | 12xGly/Ser-LgBiT-3xGly/Ser-6xHis | | | |
| HaloTag[3-19](G3K)- | HaloTag[22-297](M2F + F148M + V177E)- | 5.03E−006 | 4.95E+004 | 1.02E−010 |
| 4xGly/Ser-VSHiBiT | 12xGly/Ser-LgBiT-3xGly/Ser-6xHis | | | |
| HaloTag[3-19](G5R)- | HaloTag[22-297](M2F + F148M + V177E)- | 2.23E−005 | 4.60E+004 | 4.85E−010 |
| 4xGly/Ser-VSHiBiT | 12xGly/Ser-LgBiT-3xGly/Ser-6xHis | | | |
| HaloTag[3-19](I2R + G3K)- | HaloTag[22-297](M2F + K140E)- | NA | 1.04E+005 | NA |
| 4xGS-VSHiBIT | 12xGly/Ser-LgBiT-3xGly/Ser-6xHis | | | |
| HaloTag[3-19](I2R + G5R)- | HaloTag[22-297](M2F + K140E)- | NA | 9.51E+004 | NA |
| 4xGS-VSHiBiT | 12xGly/Ser-LgBiT-3xGly/Ser-6xHis | | | |
| HaloTag[3-19](D9R + | HaloTag[22-297](M2F + K140E)- | 1.69E−005 | 1.52E+005 | 1.11E−010 |
| E14K)-4xGS-VSHiBiT | 12xGly/Ser-LgBiT-3xGly/Ser-6xHis | | | |
| HaloTag[3-19](D9R + | HaloTag[22-297](M2F + K140E)- | NA | 1.34E+005 | NA |
| L16R)-4xGS-VSHiBiT | 12xGly/Ser-LgBiT-3xGly/Ser-6xHis | | | |
| HaloTag[3-19](I2R + D9R)- | HaloTag[22-297](M2F + K140E)- | NA | 1.28E+005 | NA |
| 4xGS-VSHiBiT | 12xGly/Ser-LgBiT-3xGly/Ser-6xHis | | | |
| HaloTag[3-19](I2R + | HaloTag[22-297](M2F + K140E)- | NA | 9.33E+004 | NA |
| G17R)-4xGS-VSHiBiT | 12xGly/Ser-LgBiT-3xGly/Ser-6xHis | | | |
| HaloTag[3-19](G3K + | HaloTag[22-297](M2F + K140E)- | NA | 1.28E+005 | NA |
| E14K)-4xGS-VSHiBiT | 12xGly/Ser-LgBiT-3xGly/Ser-6xHis | | | |
| HaloTag[3-19](G3K + | HaloTag[22-297](M2F + K140E)- | NA | 9.71E+004 | NA |
| L16R)-4xGS-VSHiBiT | 12xGly/Ser-LgBiT-3xGly/Ser-6xHis | | | |
| HaloTag[3-19](I2R + | LgBiT-6xHis | 2.40E−05 | 7.45E+004 | 3.23E−010 |
| G3K)-4xGS-VSHiBiT | | | | |
| HaloTag[3-19](I2R + G5R)- | LgBiT-6xHis | 5.86E−06 | 5.32E+04 | 1.10E−010 |
| 4xGS-VSHiBiT | | | | |
| HaloTag[3-19](D9R + | LgBiT-6xHis | NA | 8.30E+04 | NA |
| E14K)-4xGS-VSHiBiT | | | | |
| HaloTag[3-19](D9R + | LgBiT-6xHis | NA | 6.48E+04 | NA |
| L16R)-4xGS-VSHiBiT | | | | |
| HaloTag[3-19](I2R)- | HaloTag[22-297](M2F + D53G + K140E)- | 4.82E−005 | 8.375E+004 | 5.755E−010 |
| 4xGly/Ser-VSHiBiT | 12xGly/Ser-LgBiT-3xGly/Ser-6xHis | | | |
| HaloTag[3-19](I2R)- | HaloTag[22-297](M2F + D53G + K140E)- | NA | 7.14E+004 | NA |
| 4xGly/Ser-VSHiBiT | 12xGly/Ser-LgBiT-3xGly/Ser-6xHis | | | |
| (K8R + K9R) | | | | |
| HaloTag[3-19](I2R)- | HaloTag[22-297](M2F + D53G + K140E)- | 6.05E−005 | 8.48E+004 | 7.13E−010 |
| VSHiBiT | 12xGly/Ser-LgBiT-3xGly/Ser-6xHis | | | |
| HaloTag[3-19](I2R)- | HaloTag[22-297](M2F + D53G + K140E)- | 1.98E−005 | 6.13E+004 | 3.23E−010 |
| 4xGly/Ser-HiBiT | 12xGly/Ser-LgBiT-3xGly/Ser-6xHis | | | |
| VSHiBiT-5xGly/Ser- | HaloTag[22-297](M2F + D53G + K140E)- | 6.94E−005 | 8.87E+004 | 7.82E−010 |
| HaloTag[3-19](I2R) | 12xGly/Ser-LgBiT-3xGly/Ser-6xHis | | | |
| VSHiBiT- | HaloTag[22-297](M2F + D53G + K140E)- | 6.77E−005 | 1.10E+005 | 6.13−010 |
| HaloTag[3-19](I2R) | 12xGly/Ser-LgBiT-3xGly/Ser-6xHis | | | |

### Example 5

### Surface Display and Complementation of HaloTag[3-19]-HiBiT Variants with HaloTag[22-297](M2F)-12×Gly/Ser-LgBiT

[0373] Experiments were conducted during development of embodiments herein demonstrating that HaloTag[3-19]-4×Gly/Ser-VS-HiBiT can be displayed on the surface of cells (FIG. 42). HaloTag[22-297](M2F)-12×Gly/Ser-LgBiT-6×His can complement surface displayed HaloTag[3-19]-4×Gly/Ser-VS-HiBiT, resulting in fluorescence signal upon addition of a fluorescent HaloTag® ligand (FIG. 42, right histogram).

[0374] Experiments were conducted during development of embodiments herein demonstrating that HaloTag[3-19]-GGSG-VS-HiBiT can be displayed on the surface of cells as a genetic fusion to EGFP (FIG. 43). HaloTag[22-297](M2F)-12×Gly/Ser-LgBiT-6×His can complement surface displayed EGFP-GGSG-HaloTag[3-19]-GGSG-VS-HiBiT, resulting in fluorescence signal upon addition of a fluorescent HaloTag® ligand (FIG. 43, right histogram).

[0375] Experiments were conducted during development of embodiments herein demonstrating that HaloTag[3-19]-GGSG-VS-HiBiT variant constructs with changes to the HiBiT sequence can be displayed on the surface of cells (FIG. 44). HaloTag[22-297](M2F)-12×Gly/Ser-LgBiT-6×His can complement surface displayed EGFP-HaloTag[3-19]-HiBiT variants, resulting in fluorescence signal upon addition of a fluorescent HaloTag® ligand (FIG. 44, right histogram).

[0376] Experiments were conducted during development of embodiments herein demonstrating that HaloTag[3-19]-GGSG-VS-HiBiT variant constructs with changes to the HiBiT sequence can be displayed on the surface of cells (FIG. 45). HaloTag[22-297](M2F)-12×Gly/Ser-LgBiT-6×His can complement surface displayed EGFP-HaloTag[3-19]-HiBiT variants, resulting in fluorescence signal upon addition of a fluorescent HaloTag® ligand (FIG. 45, right histogram).

[0377] Experiments were conducted during development of embodiments herein demonstrating that HaloTag[3-19]-GGSG-VS-HiBiT variant constructs with changes to the HiBiT sequence can be displayed on the surface of cells (FIG. 46). HaloTag[22-297](M2F)-12×Gly/Ser-LgBiT-6×His can complement surface displayed EGFP-HaloTag[3-19]-HiBiT variants, resulting in fluorescence signal upon addition of a fluorescent HaloTag® ligand (FIG. 46, right histogram).

### Example 6

### Detection of Genetic Fusions to the HaloTag[3-19]-HiBiT Tag in E. coli Lysates

[0378] Experiments were conducted during development of embodiments herein demonstrating that we can genetically fuse either the HaloTag[3-19] or dual tag HaloTag[3-19]-HiBiT to FKBP as a target protein and observe complementation with HaloTag[22-297](M2F)-12×Gly/Ser-LgBiT or the more stable variant with M49F+D53G mutations (FIG. 47). The presence of the HiBiT in the dual tag fusion enhances the detection of the target protein, resulting in higher signals.

### Example 7

### Stabilization of Activity of LgHT-LgBiT Variants by Synthetic Peptides in E. coli Lysates

[0379] Experiments were conducted during development of embodiments herein demonstrating that we can use a synthetic peptide version of the HaloTag[3-19] fragment and observe stabilization of the more stable variant HaloTag[22-297](M2F+D53S+D56P)-12×Gly/Ser-LgBiT at higher temperature of 40 C, with no significant loss in activity after 30 minute incubation (FIG. 48). Without the D53G+D56S mutations, the parental protein loses stability and activity after incubation at 40 C.

[0380] Experiments were conducted during development of embodiments herein demonstrating that differential activity and stabilization of the HaloTag[22-297](M2F)-12×Gly/Ser-LgBiT with different synthetic peptides (FIG. 49). The results show that adding the HiBiT to the dual tag peptide does not reduce stabilization of the HaloTag-[3-19] peptide. They also show that adding a Gly/Ser linker in the peptide between the two tag sequences, detection is improved with higher signals.

[0381] Similar to the experiment depicted in FIG. 49, except that with the mutations D53G+V177E, both expression and stabilization of the construct is increased while maintaining its response to peptide, the optimal temperature of peptide stabilization versus the non-peptide condition is at a higher temperature, closer to 35° C. (FIG. 50).

[0382] Similar to previous experiments, except that with the stabilizing mutations M49F+S89A, the optimal temperature of peptide stabilization versus the non-peptide condition is at a higher temperature, closer to 35° C. (FIG. 51).

[0383] Similar to previous experiment except that with the stabilizing mutations M49F+L57I, the optimal temperature of peptide stabilization versus the non-peptide condition is at an even higher temperature, closer to 40° C. (FIG. 52).

### Example 8

### Labeling Kinetics of LgHT-LgBiT Variants with TMR HaloTag Ligand in E. coli Lysates

[0384] Experiments were conducted during development of embodiments herein to analyze the labeling kinetics of LgHT-LgBiT variants with TMR HaloTag® ligand in E. coli lysates.

[0385] The higher plateau of the M2F+D53G+V177E variant over the M2F control is indicative of improved expression of this construct in E. coli lysates with simultaneous improvement in response to synthetic peptide complementation, measured in the experiments of FIG. 53 as faster ligand binding and labeling with the TMR chloroalkane HaloTag® ligand.

[0386] The higher plateau of the M2F+K140E variant over the M2F control is indicative of improved expression of this construct in E. coli lysates (FIG. 54). This variant shows that it has similar levels of non-complemented “background” labeling in the absence of peptide (-peptide) as the M2F control but with improved expression, resulting in better fold response to complementation with the peptide. Therefore, this is a high value variant since it improves the dynamic range of detection while also improving the expression and stability of the construct.

[0387] FIG. 55 demonstrates that the parental M2F variant is improved by adding the K140E mutation, and then further improved with the combined D53G+K140E mutations in terms of consecutively lower levels of “background” or peptide-independent labeling with the TMR HaloTag® ligand. Therefore, the triple mutant M2F+D53G+K140E has the best dynamic range of all combinations tested and is our best candidate protein.

[0388] Several single and double mutant combinations that improve the fold response of the system to synthetic peptide over the M2F parental template (FIG. 56). Notably, the K140E, A131R, V7E, and V7E+E203D are some of the best performers, most of which are lower in expression except for K140E which improves both attributes.

### Example 9

### Stability and Labeling Kinetics of Purified LgHT-LgBiT Variants with TMR HaloTag Ligand

[0389] While experiments above were performed using E. coli lysates, experiments were also conducted during development of embodiments herein using a completely purified system with both purified HaloTag[22-297](M2F)-12×Gly/Ser-LgBiT-6×His combined with synthetic HaloTag[3-19] peptide.

[0390] The peptide has a stabilization effect on the active protein, since a 32° C. incubation is enough to eliminate activity without peptide, whereas the presence of peptide retains a significant fraction of the original activity in non-heat treated (4 C) reactions (FIG. 57).

[0391] Similar to experiments in E coli lysates, the M2F+K140E variant exhibits improved initial labeling rate of the protein (4° C. samples) and a greater retention of activity after 32° C. incubation when synthetic peptide is present (32° C., +peptide) (FIG. 58). Thus, the M2F+K140E shows improved dynamic range in the assay.

[0392] The M2F+D53G+V177E variant as a purified protein performs similarly to lysates, with a greater stability and initial activity relative to the M2F template (FIG. 59). However, it does have higher “background” labeling (-peptide) under these temperature challenge conditions, which limits its dynamic range or measured response to peptide. Higher temperature challenge conditions, such as 35° C., fit the optimal dynamic range of this variant.

[0393] The M2F+D53S+V177E is an example of a more highly stabilized variant, which loses less than half of its activity at a higher 37° C. temperature challenge (FIG. 60). M2F+D53S+V177E still maintains a measurable stabilization and activity response to the presence of peptide, demonstrating that the stability of the protein can be tuned without compromising its functional as a complementation reporter.

[0394] The M2F+D53G+K140E provides an improvement in response to peptide relative to the M2F+K140E double mutant (FIG. 61).

### Example 10

### Performance Evaluation in Mammalian Cells

[0395] Experiments were conducted during development of embodiments herein to evaluate the performance of HaloTag[22-297](M2F)-12×Gly/Ser-LgBiT variants and the HaloTag[3-19]-5×Gly/Ser-VS-HiBiT tag upon overexpression in mammalian cells using plate assays (FIGS. 62-75), flow cytometry (FIGS. 76-97), and confocal imaging (FIGS. 98-99). In flow cytometry experiments, to assess the expression of HaloTag[3-19]-5×Gly/Ser-VS-HiBiT, a strategy where the enhanced Green Fluorescent Protein (EGFP) was fused to HaloTag[3-19]-5×Gly/Ser-VS-HiBiT was employed. This allowed for comparison of the far-red signal of the complemented complex in the far-red channel with the expression of HaloTag[3-19]-5×Gly/Ser-VS-HiBiT in the green channel. Additionally, this approach allowed for the measurement of HaloTag[3-19]-5×Gly/Ser-VS-HiBiT expression levels across different transfection experiments. The initial step of the gating strategy, involving the filtration of dead cells, cell debris, doubles, and cell aggregates, followed the same principles as described in Section B for single-color cytometry. However, further gating steps were necessary in the two-color cytometry assay to identify single-positive populations for each channel, as well as double-positive and double-negative populations.

[0396] Experiments were conducted during development of embodiments herein to evaluate transiently transfected HaloTag[22-297](M2F)-12×Gly/Ser-LgBiT variant function in endogenously tagged PARP1-GGSG[HaloTag3-19]-GGSG-HiBiT in mammalian cells (FIGS. 100-102). The HaloTag[3-19]—VS-HiBiT variant with the two 4GS linkers exhibits significantly higher luminescent activity compared to the variant without linkers. These findings highlight the role of linker length in facilitating the complementation of the complex. The 4GS linker was retained for subsequent experiments.

[0397] To assess the fluorescent intensity and fold response of the endogenously expressed HaloTag[3-19]—VS-HiBiT variants in conjunction with overexpressed HaloTag[22-297](M2F)-12×Gly/Ser-LgBiT variants, transient transfections of the PARP-1 CRISPR cell line were conducted, which was tagged with the HaloTag[3-19]—VS-HiBiT variant containing 4GS linkers. Different concentrations of HaloTag[22-297](M2F)-12×Gly/Ser-LgBiT variants DNA were utilized to determine the optimal amount for efficient transfection of the PARP-1 CRISPR cell line. Furthermore, the effects of employing two distinct promoters were explored, namely the strong CMV promoter and the weak TK promoter, for the overexpression of the HaloTag[22-297](M2F)-12×Gly/Ser-LgBiT variants. This evaluation allowed for investigation of the influence of varying expression levels of the HaloTag[22-297](M2F)-12×Gly/Ser-LgBiT variants on Fluorescent intensity and the fold response.

[0398] Experiments were conducted during development of embodiments herein to evaluate the performance of HaloTag[22-297](M2F)-12×Gly/Ser-LgBiT variants and the HaloTag[3-19]-5×Gly/Ser-VS-HiBiT tag upon overexpression in mammalian cells using flow cytometry (FIGS. 103-115) and confocal imaging (FIGS. 116-119).

[0399] A variable used to assess the fold response of the system in flow cytometry experiments was the comparison of fold response based on the percentage of cells in the JF646 positive gate relative to the total cells in the positive and negative JF646 populations. This variable is referred to as the frequency of the parent. Comparing this variable between CRISPR cells and parental cells provides insight into the enrichment of tagged CRISPR cells over parental cells within a specific gate. In the experimental phase, transient transfection of the PARP-1-tagged DLD-1 CRISPR cell line expressing GGSG-HaloTag[3-19]-GGSG-VS-HiBiT with HaloTag[22-297](M2F)-12×Gly/Ser-LgBiT variants mRNA was conducted. The primary aim was to investigate the potential benefits of using HaloTag[22-297](M2F)-12×Gly/Ser-LgBiT variants mRNA, as opposed to DNA, in terms of enhancing expression homogeneity and improving transfection efficiency. To achieve this objective, various concentrations of HaloTag[22-297](M2F)-12×Gly/Ser-LgBiT variants mRNA were applied to the CRISPR cell line for the evaluation of specific signals. Additionally, the parental DLD-1 cells were utilized as a control to measure the background signal and determine the concentration of HaloTag[22-297](M2F)-12×Gly/Ser-LgBiT variants mRNA that yields the highest fluorescent fold response.

### Example 11

[0400] Experiments were conducted during development of embodiments herein to confirm data from biolayer interferometry (BLI) that shows exceptionally slow dissociation kinetics of the LgHT-LgBiT from the DualTag peptide (FIG. 120). It also shows that LgBiT alone has a faster dissociation from the DualTag peptide relative to the LgHT-LgBiT, indicating that additional contacts between the LgHT and DualTag sequences both contribute to the system's binding kinetics.

[0401] Experiments were conducted during development of embodiments herein to demonstrate the use of LgHT-LgBiT and the DualTag with NanoBRET (FIG. 121). It simultaneously measures the luminescence output from the LgBiT:HiBiT portion of the complex, which is dependent on the amount of complementation of the fragments, and the BRET ratio is directly related to the fraction of complexes bound to the HaloTag® NanoBRET® 618 Ligand. The use of these measurements to calculate the BRET ratio gives a measure of occupancy of the complex with HaloTag 618 ligand over a broad range of concentrations, allowing the LgHT activity to be monitored in both the presence or absence of complementation with HaloTag[3-19] portion of the DualTag peptide.

[0402] Experiments were conducted during development of embodiments herein to demonstrate the stabilization of the LgHT-LgBiT by the DualTag peptide (FIG. 122). The Raw BRET ratio, which indicates the amount of active LgHT-LgBiT remaining in the complex over time remains higher than the LgHT-LgBiT alone, showing that both its LgBiT luminescence and LgHT ligand binding activity remain intact for longer in the presence of DualTag peptide. The relatively stable luminescence donor signal over time that occurs as luminescence acceptor signal and BRET ratio decline indicates that the LgBiT in the LgHT-LgBiT fusion can retain activity even when the LgHT activity is lost.

[0403] Experiments were conducted during development of embodiments herein to demonstrate that the level of active LgHT-LgBiT in maintained longer in cells also expressing a target protein with an endogenous DualTag using a Cycloheximide Pulse-Chase approach (FIG. 124). Alongside evidence from flow cytometry, it supports a model where the LgHT-LgBiT binds and is stabilized by the DualTag, which results in greater lifespan and therefore labeling of the active complex in cells.

### Example 12

### Labeling Kinetics of HaloTag[22-297]-12×Gly/Ser-LgBiT with Various HaloTag Ligands

[0404] Experiments conducted during development of embodiments herein demonstrated that HaloTag[22-297](M2F+D53G+K140E)-12×Gly/Ser-LgBiT-3×Gly/Ser-6×His is functional with JF549 HaloTag ligand (FIG. 132).

[0405] Experiments conducted during development of embodiments herein demonstrated that HaloTag[22-297](M2F+D53G+K140E)-12×Gly/Ser-LgBiT-3×Gly/Ser-6×His is functional with JF503 HaloTag ligand (FIG. 133).

[0406] Experiments conducted during development of embodiments herein demonstrated that HaloTag[22-297](M2F+D53G+K140E)-12×Gly/Ser-LgBiT-3×Gly/Ser-6×His is functional with JFX554 HaloTag ligand (FIG. 134).

[0407] Experiments conducted during development of embodiments herein demonstrated that HaloTag[22-297](M2F+D53G+K140E)-12×Gly/Ser-LgBiT-3×Gly/Ser-6×His is functional with Oregon Green HaloTag ligand (FIG. 135).

[0408] Experiments conducted during development of embodiments herein demonstrated that HaloTag[22-297](M2F+D53G+K140E)-12×Gly/Ser-LgBiT-3×Gly/Ser-6×His is functional with FAM HaloTag ligand (FIG. 136).

### Sequences

[0409] The following sequences are referred to herein, contained within the Sequence Listing filed herewith, and are within the scope of embodiments herein.
[0410] SEQ ID NO: 1—HaloTag®
[0411] SEQ ID NOS: 2-577—split HaloTag® (spHTs)
[0412] SEQ ID NOS: 578-1187—Exemplary peptide components of a modified dehalogenase complex (SmHTs)
[0413] SEQ ID NOS: 1888-3033—Exemplary polypeptide components of a modified dehalogenase complex (LgHTs)
[0414] SEQ ID NOS: 3034-3035—Exemplary SmHT consensus sequences
[0415] SEQ ID NO: 3036—β10 of NanoLuc
[0416] SEQ ID NO: 3037—Exemplary polypeptide component of a bioluminescent complex (LgBiT)
[0417] SEQ ID NO: 3038—Exemplary high-affinity peptide component of a bioluminescent complex (HiBiT)
[0418] SEQ ID NO: 3039—Exemplary low-affinity peptide component of a bioluminescent complex (SmBiT)
[0419] SEQ ID NO: 3040—Full length sequence of NanoTrip-β9-HiBiT
[0420] SEQ ID NO: 3041—Full length sequence of NanoTrip-β9-SmBiT)
[0421] SEQ ID NO: 3042—NanoLuc β1-5
[0422] SEQ ID NO: 3043—NanoLuc β1-6
[0423] SEQ ID NO: 3044—NanoLuc β1-7
[0424] SEQ ID NO: 3045—NanoLuc β1-8
[0425] SEQ ID NO: 3046—NanoLuc β6-10-like (Hi affinity)
[0426] SEQ ID NO: 3047—NanoLuc β7-10-like (Hi affinity)
[0427] SEQ ID NO: 3048—NanoLuc β8-10-like (Hi affinity)
[0428] SEQ ID NO: 3049—NanoLuc β9-10-like (Hi affinity)
[0429] SEQ ID NO: 3050—NanoLuc β6-10-like (Lo affinity)
[0430] SEQ ID NO: 3051—NanoLuc β7-10-like (Lo affinity)
[0431] SEQ ID NO: 3052—NanoLuc β8-10-like (Lo affinity)
[0432] SEQ ID NO: 3053—NanoLuc β9-10-like (Lo affinity)
[0433] SEQ ID NO: 3054—NanoLuc β6
[0434] SEQ ID NO: 3055—NanoLuc β7
[0435] SEQ ID NO: 3056—NanoLuc β8
[0436] SEQ ID NO: 3057—NanoLuc β9
[0437] SEQ ID NO: 3058—Exemplary high-affinity peptide component of a bioluminescent complex (HiBiT)
[0438] SEQ ID NO: 3059—Exemplary NanoLuc β9-like peptide
[0439] SEQ ID NO: 3060—Exemplary high-affinity peptide component of a bioluminescent complex (SmHiTrip10)
[0440] SEQ ID NOS: 3061, 3064-3066, and 3079-3091—Exemplary variant peptide components of a modified dehalogenase complex
[0441] SEQ ID NO: 3093—Exemplary high-affinity peptide component of a bioluminescent complex (HiBiT)
[0442] SEQ ID NOS: 3062-3063, 3067-3078, 3092, 3094-3109, and 4177-4181—Exemplary fusions of high-affinity peptide components of a bioluminescent complex and peptide components of a modified dehalogenase complex

TABLE 2
Exemplary peptide sequences

| SEQ | | |
|---|---|---|
| ID | | |
| NO | Description | Sequence |
| 3061 | HaloTag[3-19] | EIGTGFPFDPHYVEVLG |
| 3062 | HaloTag[3-19]-5xGly/Ser-VS-HiBiT | EIGTGFPFDPHYVEVLGGGSGGVSVSGWRLFKKIS |
| 3063 | VS-HiBiT-5xGly/Ser-HaloTag[3-19] | VSVSGWRLFKKISGGSGGEIGTGFPFDPHYVEVLG |
| 3064 | HaloTag[3-19] (I2R + G3K + G5R) | ERKTRFPFDPHYVEVLG |
| 3065 | HaloTag[3-19] (D9R + E14K + L16R) | EIGTGFPFRPHYVKVRG |
| 3066 | HaloTag[3-19] (I2R + G3K + G5R + G17R) | ERKTRFPFDPHYVEVLR |
| 3067 | HaloTag[3-19]-HiBiT | EIGTGFPFDPHYVEVLGVSGWRLFKKIS |
| 3068 | HaloTag[3-19] (G3D + G5E + P10E)-HiBIT | EIGTGFPFDPHYVEVLGVSGWRLFKKIS |
| 3069 | HaloTag[3-19] (D9R + E14K + L16R)-HiBiT | EIGTGFPFRPHYVKVRGVSGWRLFKKIS |
| 3070 | HaloTag[3-19] (I2R + G3K + G5R)-VS-HiBIT | ERKTRFPFDPHYVEVLGVSVSGWRLFKKIS |
| 3071 | HaloTag[3-19] (D9R + E14K + L16R)VS-HiBIT | EIGTGFPFRPHYVKVRGVSVSGWRLFKKIS |
| 3072 | HaloTag[3-19] (I2R + G3K+ G5R + G17R)-VS- | ERKTRFPFDPHYVEVLRVSVSGWRLFKKIS |
| | HiBiT | |
| 3073 | HaloTag[3-19] (I2V + G3S + T4E + G5D + D9E + | EVSEDFPFEPNYIEVLGVSVSGWRLFKKIS |
| | H11N + V13I)-VS-HiBiT | |
| 3074 | HaloTag[3-19] (I2R + G3S + T4S + G5T + D9E + | ERSSTFPFEEHYVEVLGVSVSGWRLFKKIS |
| | P10E)-VS-HiBiT | |
| 3075 | HaloTag[3-19] (G3S + T4S + G5D + D9K + P10S)- | EISSDFPFKSHYVEVLGVSVSGWRLFKKIS |
| | VS-HiBiT | |
| 3076 | HaloTag[3-19] | EKSTEFPFKDHFVRCLGVSVSGWRLFKKIS |
| | (I2K + G3S + G5E + D9K + P10D + Y12F + E14R + | |
| | V15C)-VS-HiBiT | |
| 3077 | HaloTag[3-19] | KFNDQWNYRANFLKIRRVSVSGWRLFKKIS |
| | (E1K + I2F + G3N + T4D + G5Q + F6W + P7N + | |
| | F8Y + D9R + P10A + H11N + Y12F + V13L + E14K + | |
| | V15I + L16R + G17R)-VS-HiBIT | |
| 3078 | HaloTag[3-19]-VS-HiBiT | EIGTGFPFDPHYVEVLGVSVSGWRLFKKIS |
| 3079 | HaloTag[3-19] | KFNDQWNYRANFLKIRR |
| | (E1K + I2F + G3N + T4D + G5Q + F6W + P7N + | |
| | F8Y + D9R + P10A + H11N + Y12F + V13L + | |
| | E14K + V15I + L16R + G17R) | |
| 3080 | HaloTag [4-19] (I2K) | KGTGFPFDPHYVEVLG |
| 3081 | HaloTag[3-19] (I2R + G3K + G5R + D9R + E14K + | ERKTRFPFRPHYVKVRR |
| | L16R + G17R) | |
| 3082 | HaloTag[3-19] | KFNDQFNFRANYVKVRR |
| | (E1K + I2F + G3N + T4D + G5Q + P7N + D9R + | |
| | P10A + H11N + E14K + L16R + G17R) | |
| 3083 | HaloTag[3-19] (D9R + E14K + L16R + G17R) | EIGTGFPFRPHYVKVRR |
| 3084 | HaloTag[3-19] (D9R + E14K + G17R) | EIGTGFPFRPHYVKVLR |
| 3085 | HaloTag[3-19] (D9R + E14R) | EIGTGFPFRPHYVRVLG |
| 3086 | HaloTag[3-19] (D9R) | EIGTGFPFRPHYVEVLG |
| 3087 | HaloTag[3-19] (I2F + T4D + G5Q) | EFGDQFPFDPHYVEVLG |
| 3088 | HaloTag[3-19] (G3N + T4D + H11N) | EINDGFPFDPNYVEVLG |
| 3089 | HaloTag[3-19] (F6W + F8Y) | EIGTGWPYDPHYVEVLG |
| 3090 | HaloTag[3-19] (G5E + P7Q + P10E) | EIGTEFQFDEHYVEVLG |
| 3091 | HaloTag[3-19] (G3D + G5E + F6W + F8Y + P10E + | EIDTEWPYDEHYIEILG |
| | V13I + V15I) | |
| 3092 | HaloTag[3-19]-4xGly/Ser-VS-HiBiT | EIGTGFPFDPHYVEVLGGGSGVSVSGWRLFKKIS |
| 3093 | Biotin-VS-HiBiT | VSVSGWRLFKKIS |
| 3094 | Biotin-HaloTag[3-19] (I2R)-4xGly/Ser-VS-HiBiT | ERGTGFPFDPHYVEVLGGGSGVSVSGWRLFKKIS |
| 3095 | Biotin-HaloTag[3-19] (G3K)-4xGly/Ser-VS-HiBIT | EIKTGFPFDPHYVEVLGGGSGVSVSGWRLFKKIS |
| 3096 | Biotin-HaloTag[3-19] (G5R)-4xGly/Ser-VS-HiBiT | EIGTRFPFDPHYVEVLGGGSGVSVSGWRLFKKIS |
| 3097 | Biotin-HaloTag[3-19] (D9R)-4xGly/Ser-VS-HiBiT | EIGTGFPFRPHYVEVLGGGSGVSVSGWRLFKKIS |
| 3098 | Biotin-HaloTag[3-19] (E14K)-4xGly/Ser-VS-HiBIT | EIGTGFPFDPHYVKVLGGGSGVSVSGWRLFKKIS |
| 3099 | Biotin-HaloTag[3-19] (L16R)-4xGly/Ser-VS-HiBiT | EIGTGFPFDPHYVEVRGGGSGVSVSGWRLFKKIS |
| 3100 | Biotin-HaloTag[3-19] (G17R)-4xGly/Ser-VS-HiBiT | EIGTGFPFDPHYVEVLRGGSGVSVSGWRLFKKIS |
| 3101 | Biotin-HaloTag[3-19] (I2R + G3K)-4xGly/Ser-VS- | ERKTGFPFDPHYVEVLGGGSGVSVSGWRLFKKIS |
| | HiBiT | |
| 3102 | Biotin-HaloTag[3-19] (I2R + G5R)-4xGly/Ser-VS- | ERGTRFPFDPHYVEVLGGGSGVSVSGWRLFKKIS |
| | HiBiT | |
| 3103 | Biotin-HaloTag[3-19] (D9R + E14K)-4xGly/Ser-VS- | EIGTGFPFRPHYVKVLGGGSGVSVSGWRLFKKIS |
| | HiBiT | |
| 3104 | Biotin-HaloTag[3-19] (D9R + L16R)-4xGly/Ser-VS- | EIGTGFPFRPHYVEVRGGGSGVSVSGWRLFKKIS |
| | HiBiT | |
| 3105 | Biotin-HaloTag[3-19] (I2R + D9R)-4xGly/Ser-VS- | ERGTGFPFRPHYVEVLGGGSGVSVSGWRLFKKIS |
| | HiBiT | |
| 3106 | Biotin-HaloTag[3-19] (I2R + G17R)-4xGly/Ser-VS- | ERGTGFPFDPHYVEVLRGGSGVSVSGWRLFKKIS |
| | HiBiT | |
| 3107 | Biotin-HaloTag[3-19] (G3K + E14K)-4xGly/Ser-VS- | EIKTGFPFDPHYVKVLGGGSGVSVSGWRLFKKIS |
| | HiBiT | |
| 3108 | Biotin-HaloTag[3-19] (G3K + L16R)-4xGly/Ser-VS- | EIKTGFPFDPHYVEVRGGGSGVSVSGWRLFKKIS |
| | HiBiT | |
| 3109 | Biotin-HaloTag[3-19] (G5R + G17R)-4xGly/Ser-VS- | EIGTRFPFDPHYVEVLRGGSGVSVSGWRLFKKIS |
| | HiBiT | |
| 4177 | Biotin-HaloTag[3-19] (I2R)-4xGly/Ser-VS-HiBiT | ERGTGFPFDPHYVEVLGGGSGVSVSGWRLFRRIS |
| | (K8R + K9R) | |
| 4178 | Biotin-HaloTag[3-19] (I2R)-VS-HiBiT | ERGTGFPFDPHYVEVLGVSVSGWRLFKKIS |
| 4179 | Biotin-HaloTag[3-19] (I2R)-4xGly/Ser-HiBiT | ERGTGFPFDPHYVEVLGGGSGVSGWRLFKKIS |
| 4180 | Biotin-VS-HiBiT-5xGly/Ser-HaloTag[3-19] (I2R) | VSVSGWRLFKKISGGSGGERGTGFPFDPHYVEVLG |
| 4181 | VS-HiBiT-HaloTag[3-19] (I2R) | VSVSGWRLFKKISERGTGFPFDPHYVEVLG |

TABLE 3
SEQ ID NOS: 3110-4064-Exemplary dual detector variants

| | SEQ |
|---|---|
| Mutant | ID NO |
| M2L + M49F | 3110 |
| M2L + D53S | 3111 |
| M2L + D53G | 3112 |
| M2L + D56P | 3113 |
| M2L + L57I | 3114 |
| M2L + E79K | 3115 |
| M2L + S89A | 3116 |
| M2L + F93L | 3117 |
| M2L + T128M | 3118 |
| M2L + A131Q | 3119 |
| M2L + T135E | 3120 |
| M2L + F148M | 3121 |
| M2L + V177E | 3122 |
| M2L + V177Q | 3123 |
| M2L + P186A | 3124 |
| M2L + P186V | 3125 |
| M2L + S238A | 3126 |
| M2L + L253I | 3127 |
| M2F + M49F + D53S | 3128 |
| M2F + M49F + D53G | 3129 |
| M2F + M49F + D56P | 3130 |
| M2F + M49F + L57I | 3131 |
| M2F + M49F + E79K | 3132 |
| M2F + M49F + S89A | 3133 |
| M2F + M49F + F93L | 3134 |
| M2F + M49F + T128M | 3135 |
| M2F + M49F + A131Q | 3136 |
| M2F + M49F + T135E | 3137 |
| M2F + M49F + F148M | 3138 |
| M2F + M49F + V177E | 3139 |
| M2F + M49F + V177Q | 3140 |
| M2F + M49F + P186A | 3141 |
| M2F + M49F + P186V | 3142 |
| M2F + M49F + S238A | 3143 |
| M2F + M49F + L253I | 3144 |
| M2F + D53S + D56P | 3145 |
| M2F + D53S + L57I | 3146 |
| M2F + D53S + E79K | 3147 |
| M2F + D53S + S89A | 3148 |
| M2F + D53S + F93L | 3149 |
| M2F + D53S + T128M | 3150 |
| M2F + D53S + A131Q | 3151 |
| M2F + D53S + T135E | 3152 |
| M2F + D53S + F148M | 3153 |
| M2F + D53S + V177E | 3154 |
| M2F + D53S + V177Q | 3155 |
| M2F + D53S + P186A | 3156 |
| M2F + D53S + P186V | 3157 |
| M2F + D53S + S238A | 3158 |
| M2F + D53S + L253I | 3159 |
| M2F + D53G + D56P | 3160 |
| M2F + D53G + L57I | 3161 |
| M2F + D53G + E79K | 3162 |
| M2F + D53G + S89A | 3163 |
| M2F + D53G + T128M | 3164 |
| M2F + D53G + A131Q | 3165 |
| M2F + D53G + T135E | 3166 |
| M2F + D53G + F148M | 3167 |
| M2F + D53G + V177E | 3168 |
| M2F + D53G + V177Q | 3169 |
| M2F + D53G + P186A | 3170 |
| M2F + D53G + P186V | 3171 |
| M2F + D53G + S238A | 3172 |
| M2F + D53G + L253I | 3173 |
| M2F + D56P + L57I | 3174 |
| M2F + D56P + E79K | 3175 |
| M2F + D56P + S89A | 3176 |
| M2F + D56P + F93L | 3177 |
| M2F + D56P + T128M | 3178 |
| M2F + D56P + A131Q | 3179 |
| M2F + D56P + T135E | 3180 |
| M2F + D56P + F148M | 3181 |
| M2F + D56P + V177E | 3182 |
| M2F + D56P + V177Q | 3183 |
| M2F + D56P + P186A | 3184 |
| M2F + D56P + P186V | 3185 |
| M2F + D56P + S238A | 3186 |
| M2F + D56P + L253I | 3187 |
| M2F + L571 + E79K | 3188 |
| M2F + L571 + S89A | 3189 |
| M2F + L571 + F93L | 3190 |
| M2F + L571 + T128M | 3191 |
| M2F + L571 + A131Q | 3192 |
| M2F + L57I + T135E | 3193 |
| M2F + L57I + F148M | 3194 |
| M2F + L57I + V177E | 3195 |
| M2F + L57I + V177Q | 3196 |
| M2F + L57I + P186A | 3197 |
| M2F + L57I + P186V | 3198 |
| M2F + L57I + S238A | 3199 |
| M2F + L57I + L253I | 3200 |
| M2F + E79K + S89A | 3201 |
| M2F + E79K + F93L | 3202 |
| M2F + E79K + T128M | 3203 |
| M2F + E79K + A131Q | 3204 |
| M2F + E79K + T135E | 3205 |
| M2F + E79K + F148M | 3206 |
| M2F + E79K + V177E | 3207 |
| M2F + E79K + V177Q | 3208 |
| M2F + E79K + P186A | 3209 |
| M2F + E79K + P186V | 3210 |
| M2F + E79K + S238A | 3211 |
| M2F + E79K + L253I | 3212 |
| M2F + S89A + F93L | 3213 |
| M2F + S89A + T128M | 3214 |
| M2F + S89A + A131Q | 3215 |
| M2F + S89A + T135E | 3216 |
| M2F + S89A + F148M | 3217 |
| M2F + S89A + V177E | 3218 |
| M2F + S89A + V177Q | 3219 |
| M2F + S89A + P186A | 3220 |
| M2F + S89A + P186V | 3221 |
| M2F + S89A + S238A | 3222 |
| M2F + S89A + L253I | 3223 |
| M2F + F93L + T128M | 3224 |
| M2F + F93L + A131Q | 3225 |
| M2F + F93L + T135E | 3226 |
| M2F + F93L + F148M | 3227 |
| M2F + F93L + V177E | 3228 |
| M2F + F93L + V177Q | 3229 |
| M2F + F93L + P186A | 3230 |
| M2F + F93L + P186V | 3231 |
| M2F + F93L + S238A | 3232 |
| M2F + F93L + L253I | 3233 |
| M2F + T128M + A131Q | 3234 |
| M2F + T128M + T135E | 3235 |
| M2F + T128M + F148M | 3236 |
| M2F + T128M + V177E | 3237 |
| M2F + T128M + V177Q | 3238 |
| M2F + T128M + P186A | 3239 |
| M2F + T128M + P186V | 3240 |
| M2F + T128M + S238A | 3241 |
| M2F + T128M + L253I | 3242 |
| M2F + A131Q + T135E | 3243 |
| M2F + A131Q + F148M | 3244 |
| M2F + A131Q + V177E | 3245 |
| M2F + A131Q + V177Q | 3246 |
| M2F + A131Q + P186A | 3247 |
| M2F + A131Q + P186V | 3248 |
| M2F + A131Q + S238A | 3249 |
| M2F + A131Q + L253I | 3250 |
| M2F + T135E + F148M | 3251 |
| M2F + T135E + V177E | 3252 |
| M2F + T135E + V177Q | 3253 |
| M2F + T135E + P186A | 3254 |
| M2F + T135E + P186V | 3255 |
| M2F + T135E + S238A | 3256 |
| M2F + T135E + L253I | 3257 |
| M2F + F148M + V177E | 3258 |
| M2F + F148M + V177Q | 3259 |
| M2F + F148M + P186A | 3260 |
| M2F + F148M + P186V | 3261 |
| M2F + F148M + S238A | 3262 |
| M2F + F148M + L253I | 3263 |
| M2F + V177E + P186A | 3264 |
| M2F + V177E + P186V | 3265 |
| M2F + V177E + S238A | 3266 |
| M2F + V177E + L253I | 3267 |
| M2F + V177Q + P186A | 3268 |
| M2F + V177Q + P186V | 3269 |
| M2F + V177Q + S238A | 3270 |
| M2F + V177Q + L253I | 3271 |
| M2F + P186A + S238A | 3272 |
| M2F + P186A + L253I | 3273 |
| M2F + P186V + S238A | 3274 |
| M2F + P186V + L253I | 3275 |
| M2F + S238A + L253I | 3276 |
| M2F + D56P + M49F + D53G | 3277 |
| M2F + D56P + D53G + L57I | 3278 |
| M2F + D56P + D53G + T128M | 3279 |
| M2F + D56P + D53G + F148M | 3280 |
| M2F + D56P + D53G + V177E | 3281 |
| M2F + D56P + D53G + P186A | 3282 |
| M2F + L57I + M49F + D53G | 3283 |
| M2F + L57I + D53G + T128M | 3284 |
| M2F + L57I + D53G + F148M | 3285 |
| M2F + L57I + D53G + V177E | 3286 |
| M2F + L57I + D53G + P186A | 3287 |
| M2F + S89A + M49F + D53G | 3288 |
| M2F + S89A + D53G + L57I | 3289 |
| M2F + S89A + D53G + T128M | 3290 |
| M2F + S89A + D53G + F148M | 3291 |
| M2F + S89A + D53G + V177E | 3292 |
| M2F + S89A + D53G + P186A | 3293 |
| M2F + V177E + M49F + D53G | 3294 |
| M2F + V177E + D53G + T128M | 3295 |
| M2F + V177E + D53G + F148M | 3296 |
| M2F + V177E + D53G + P186A | 3297 |
| M2F + P186A + M49F + D53G | 3298 |
| M2F + P186A + D53G + T128M | 3299 |
| M2F + P186A + D53G + F148M | 3300 |
| M2F + L253I + M49F + D53G | 3301 |
| M2F + L253I + D53G + L57I | 3302 |
| M2F + L253I + D53G + T128M | 3303 |
| M2F + L253I + D53G + F148M | 3304 |
| M2F + L253I + D53G + V177E | 3305 |
| M2F + L253I + D53G + P186A | 3306 |
| M2F + D53S + D56P + M49F | 3307 |
| M2F + D53S + D56P + L57I | 3308 |
| M2F + D53S + D56P + T128M | 3309 |
| M2F + D53S + D56P + F148M | 3310 |
| M2F + D53S + D56P + V177E | 3311 |
| M2F + D53S + D56P + P186A | 3312 |
| M2F + D53S + L57I + M49F | 3313 |
| M2F + D53S + L57I + T128M | 3314 |
| M2F + D53S + L57I + F148M | 3315 |
| M2F + D53S + L57I + V177E | 3316 |
| M2F + D53S + L57I + P186A | 3317 |
| M2F + D53S + S89A + M49F | 3318 |
| M2F + D53S + S89A + L57I | 3319 |
| M2F + D53S + S89A + T128M | 3320 |
| M2F + D53S + S89A + F148M | 3321 |
| M2F + D53S + S89A + V177E | 3322 |
| M2F + D53S + S89A + P186A | 3323 |
| M2F + D53S + V177E + M49F | 3324 |
| M2F + D53S + V177E + T128M | 3325 |
| M2F + D53S + V177E + F148M | 3326 |
| M2F + D53S + V177E + P186A | 3327 |
| M2F + D53S + P186A + M49F | 3328 |
| M2F + D53S + P186A + T128M | 3329 |
| M2F + D53S + P186A + F148M | 3330 |
| M2F + D53S + L253I + M49F | 3331 |
| M2F + D53S + L253I + L57I | 3332 |
| M2F + D53S + L253I + T128M | 3333 |
| M2F + D53S + L253I + F148M | 3334 |
| M2F + D53S + L253I + V177E | 3335 |
| M2F + D53S + L253I + P186A | 3336 |
| M2F + D53G + L57I + M49F + S89A | 3337 |
| M2F + D53G + L57I + M49F + V177Q | 3338 |
| M2F + D53G + T128M + M49F + L57I | 3339 |
| M2F + D53G + T128M + M49F + S89A | 3340 |
| M2F + D53G + T128M + M49F + V177Q | 3341 |
| M2F + D53G + F148M + M49F + L57I | 3342 |
| M2F + D53G + F148M + M49F + S89A | 3343 |
| M2F + D53G + F148M + M49F + V177Q | 3344 |
| M2F + D53G + V177E + M49F + L57I | 3345 |
| M2F + D53G + V177E + M49F + S89A | 3346 |
| M2F + D53G + P186A + M49F + L57I | 3347 |
| M2F + D53G + P186A + M49F + S89A | 3348 |
| M2F + D53G + P186A + M49F + V177Q | 3349 |
| M2F + D53S + D56P + M49F + L57I | 3350 |
| M2F + D53S + D56P + M49F + S89A | 3351 |
| M2F + D53S + D56P + M49F + V177Q | 3352 |
| M2F + D53S + L57I + M49F + S89A | 3353 |
| M2F + D53S + L57I + M49F + V177Q | 3354 |
| M2F + D53S + S89A + M49F + V177Q | 3355 |
| M2F + D53S + V177E + M49F + L57I | 3356 |
| M2F + D53S + V177E + M49F + S89A | 3357 |
| M2F + D53S + P186A + M49F + L57I | 3358 |
| M2F + D53S + P186A + M49F + S89A | 3359 |
| M2F + D53S + P186A + M49F + V177Q | 3360 |
| M2F + D53S + L253I + M49F + L57I | 3361 |
| M2F + D53S + L253I + M49F + S89A | 3362 |
| M2F + D53S + L253I + M49F + V177Q | 3363 |
| M2F + L57I + S89A + M49F + V177Q | 3364 |
| M2F + L57I + S89A + D53G + T128M | 3365 |
| M2F + L57I + S89A + D53G + F148M | 3366 |
| M2F + L57I + S89A + D53G + V177E | 3367 |
| M2F + L57I + S89A + D53G + P186A | 3368 |
| M2F + L57I + S89A + D53S + D56P | 3369 |
| M2F + L57I + S89A + D53S + V177E | 3370 |
| M2F + L57I + S89A + D53S + P186A | 3371 |
| M2F + L57I + S89A + D53S + L253I | 3372 |
| M2F + L57I + V177E + M49F + S89A | 3373 |
| M2F + L57I + V177E + D53G + T128M | 3374 |
| M2F + L57I + V177E + D53G + F148M | 3375 |
| M2F + L57I + V177E + D53G + P186A | 3376 |
| M2F + L57I + V177E + D53S + D56P | 3377 |
| M2F + L57I + V177E + D53S + P186A | 3378 |
| M2F + L57I + V177E + D53S + L253I | 3379 |
| M2F + L57I + T135E + M49F + D53G | 3380 |
| M2F + L57I + T135E + M49F + S89A | 3381 |
| M2F + L57I + T135E + M49F + V177Q | 3382 |
| M2F + L57I + T135E + D53G + T128M | 3383 |
| M2F + L57I + T135E + D53G + F148M | 3384 |
| M2F + L57I + T135E + D53G + V177E | 3385 |
| M2F + L57I + T135E + D53G + P186A | 3386 |
| M2F + L57I + T135E + D53S + D56P | 3387 |
| M2F + L57I + T135E + D53S + S89A | 3388 |
| M2F + L57I + T135E + D53S + V177E | 3389 |
| M2F + L57I + T135E + D53S + P186A | 3390 |
| M2F + L57I + T135E + D53S + L253I | 3391 |
| M2F + L57I + S238A + M49F + D53G | 3392 |
| M2F + L57I + S238A + M49F + S89A | 3393 |
| M2F + L57I + S238A + M49F + V177Q | 3394 |
| M2F + L57I + S238A + D53G + T128M | 3395 |
| M2F + L57I + S238A + D53G + F148M | 3396 |
| M2F + L57I + S238A + D53G + V177E | 3397 |
| M2F + L57I + S238A + D53G + P186A | 3398 |
| M2F + L57I + S238A + D53S + D56P | 3399 |
| M2F + L57I + S238A + D53S + S89A | 3400 |
| M2F + L57I + S238A + D53S + V177E | 3401 |
| M2F + L57I + S238A + D53S + P186A | 3402 |
| M2F + L57I + S238A + D53S + L253 | 3403 |
| M2F + S89A + T135E + M49F + D53G | 3404 |
| M2F + S89A + T135E + M49F + V177Q | 3405 |
| M2F + S89A + T135E + D53G + L57I | 3406 |
| M2F + S89A + T135E + D53G + T128M | 3407 |
| M2F + S89A + T135E + D53G + F148M | 3408 |
| M2F + S89A + T135E + D53G + V177E | 3409 |
| M2F + S89A + T135E + D53G + P186A | 3410 |
| M2F + S89A + T135E + D53S + D56P | 3411 |
| M2F + S89A + T135E + D53S + V177E | 3412 |
| M2F + S89A + T135E + D53S + P186A | 3413 |
| M2F + S89A + T135E + D53S + L253 | 3414 |
| M2F + S89A + T135E + L57I + V177E | 3415 |
| M2F + S89A + T135E + L57I + S238A | 3416 |
| M2F + S89A + V177E + D53G + T128M | 3417 |
| M2F + S89A + V177E + D53G + F148M | 3418 |
| M2F + S89A + V177E + D53G + P186A | 3419 |
| M2F + S89A + V177E + D53S + D56P | 3420 |
| M2F + S89A + V177E + D53S + P186A | 3421 |
| M2F + S89A + V177E + D53S + L253I | 3422 |
| M2F + S89A + V177E + L57I + S238A | 3423 |
| M2F + F93L + F148M + M49F + D53G | 3424 |
| M2F + F93L + F148M + M49F + L57I | 3425 |
| M2F + F93L + F148M + M49F + S89A | 3426 |
| M2F + F93L + F148M + M49F + V177Q | 3427 |
| M2F + F93L + F148M + D53G + L57 | 3428 |
| M2F + F93L + F148M + D53G + T128M | 3429 |
| M2F + F93L + F148M + D53G + V177E | 3430 |
| M2F + F93L + F148M + D53G + P186A | 3431 |
| M2F + F93L + F148M + D53S + D56P | 3432 |
| M2F + F93L + F148M + D53S + L57I | 3433 |
| M2F + F93L + F148M + D53S + S89A | 3434 |
| M2F + F93L + F148M + D53S + V177E | 3435 |
| M2F + F93L + F148M + D53S + P186A | 3436 |
| M2F + F93L + F148M + D53S + L253 | 3437 |
| M2F + F93L + F148M + L57I + S89A | 3438 |
| M2F + F93L + F148M + L57I + V177E | 3439 |
| M2F + F93L + F148M + L57I + T135E | 3440 |
| M2F + F93L + F148M + L57I + S238A | 3441 |
| M2F + F93L + F148M + S89A + T135E | 3442 |
| M2F + F93L + F148M + S89A + V177E | 3443 |
| M2F + F93L + P186A + M49F + D53G | 3444 |
| M2F + F93L + P186A + M49F + L57I | 3445 |
| M2F + F93L + P186A + M49F + S89A | 3446 |
| M2F + F93L + P186A + M49F + V177Q | 3447 |
| M2F + F93L + P186A + D53G + L57I | 3448 |
| M2F + F93L + P186A + D53G + T128M | 3449 |
| M2F + F93L + P186A + D53G + V177E | 3450 |
| M2F + F93L + P186A + D53S + D56P | 3451 |
| M2F + F93L + P186A + D53S + L57I | 3452 |
| M2F + F93L + P186A + D53S + S89A | 3453 |
| M2F + F93L + P186A + D53S + V177E | 3454 |
| M2F + F93L + P186A + D53S + L253I | 3455 |
| M2F + F93L + P186A + L57I + S89A | 3456 |
| M2F + F93L + P186A + L57I + V177E | 3457 |
| M2F + F93L + P186A + L57I + T135E | 3458 |
| M2F + F93L + P186A + L57I + S238A | 3459 |
| M2F + F93L + P186A + S89A + T135E | 3460 |
| M2F + F93L + P186A + S89A + V177E | 3461 |
| M2F + T135E + L253I + M49F + D53G | 3462 |
| M2F + T135E + L253I + M49F + L57I | 3463 |
| M2F + T135E + L253I + M49F + S89A | 3464 |
| M2F + T135E + L253I + M49F + V177Q | 3465 |
| M2F + T135E + L253I + D53G + L57 | 3466 |
| M2F + T135E + L253I + D53G + T128M | 3467 |
| M2F + T135E + L253I + D53G + F148M | 3468 |
| M2F + T135E + L253I + D53G + V177E | 3469 |
| M2F + T135E + L253I + D53G + P186A | 3470 |
| M2F + T135E + L253I + D53S + D56P | 3471 |
| M2F + T135E + L253I + D53S + V177E | 3472 |
| M2F + T135E + L253I + D53S + P186A | 3473 |
| M2F + T135E + L253I + L57I + S89A | 3474 |
| M2F + T135E + L253I + L57I + V177E | 3475 |
| M2F + T135E + L253I + L57I + S238A | 3476 |
| M2F + T135E + L253I + S89A + V177E | 3477 |
| M2F + T135E + L253I + F93L + F148M | 3478 |
| M2F + T135E + L253I + F93L + P186A | 3479 |
| M2F + F148M + V177E + M49F + D53G | 3480 |
| M2F + F148M + V177E + M49F + L57I | 3481 |
| M2F + F148M + V177E + M49F + S89A | 3482 |
| M2F + F148M + V177E + D53G + T128M | 3483 |
| M2F + F148M + V177E + D53G + P186A | 3484 |
| M2F + F148M + V177E + D53S + D56P | 3485 |
| M2F + F148M + V177E + D53S + L57I | 3486 |
| M2F + F148M + V177E + D53S + S89A | 3487 |
| M2F + F148M + V177E + D53S + P186A | 3488 |
| M2F + F148M + V177E + D53S + L253I | 3489 |
| M2F + F148M + V177E + L57I + S89A | 3490 |
| M2F + F148M + V177E + L57I + T135E | 3491 |
| M2F + F148M + V177E + L57I + S238A | 3492 |
| M2F + F148M + V177E + S89A + T135E | 3493 |
| M2F + F148M + V177E + F93L + P186A | 3494 |
| M2F + F148M + V177E + T135E + L253 | 3495 |
| M2F + A131Q + F148M + M49F + D53G | 3496 |
| M2F + A131Q + F148M + M49F + L57I | 3497 |
| M2F + A131Q + F148M + M49F + S89A | 3498 |
| M2F + A131Q + F148M + M49F + V177Q | 3499 |
| M2F + A131Q + F148M + D53G + L57I | 3500 |
| M2F + A131Q + F148M + D53G + T128M | 3501 |
| M2F + A131Q + F148M + D53G + V177E | 3502 |
| M2F + A131Q + F148M + D53G + P186A | 3503 |
| M2F + A131Q + F148M + D53S + D56P | 3504 |
| M2F + A131Q + F148M + D53S + L57I | 3505 |
| M2F + A131Q + F148M + D53S + S89A | 3506 |
| M2F + A131Q + F148M + D53S + V177E | 3507 |
| M2F + A131Q + F148M + D53S + P186A | 3508 |
| M2F + A131Q + F148M + D53S + L253 | 3509 |
| M2F + A131Q + F148M + L57I + S89A | 3510 |
| M2F + A131Q + F148M + L57I + V177E | 3511 |
| M2F + A131Q + F148M + L57I + T135E | 3512 |
| M2F + A131Q + F148M + L57I + S238A | 3513 |
| M2F + A131Q + F148M + S89A + T135E | 3514 |
| M2F + A131Q + F148M + S89A + V177E | 3515 |
| M2F + A131Q + F148M + F93L + P186A | 3516 |
| M2F + A131Q + F148M + T135E + L253I | 3517 |
| M2F + A131Q + F148M + V177Q + M49F + D53G | 3518 |
| M2F + A131Q + V177Q + M49F + L57I | 3519 |
| M2F + A131Q + V177Q + M49F + S89A | 3520 |
| M2F + A131Q + V177Q + D53G + L57I | 3521 |
| M2F + A131Q + V177Q + D53G + T128M | 3522 |
| M2F + A131Q + V177Q + D53G + F148M | 3523 |
| M2F + A131Q + V177Q + D53G | 3524 |
| M2F + A131Q + V177Q + D53G + P186A | 3525 |
| M2F + A131Q + V177Q + D53S + D56P | 3526 |
| M2F + A131Q + V177Q + D53S + L57I | 3527 |
| M2F + A131Q + V177Q + D53S + S89A | 3528 |
| M2F + A131Q + V177Q + D53S | 3529 |
| M2F + A131Q + V177Q + D53S + P186A | 3530 |
| M2F + A131Q + V177Q + D53S + L253I | 3531 |
| M2F + A131Q + V177Q + L57I + S89A | 3532 |
| M2F + A131Q + V177Q + L57I | 3533 |
| M2F + A131Q + V177Q + L57I + T135E | 3534 |
| M2F + A131Q + V177Q + L57I + S238A | 3535 |
| M2F + A131Q + V177Q + S89A + T135E | 3536 |
| M2F + A131Q + V177Q + S89A | 3537 |
| M2F + A131Q + V177Q + F93L + F148M | 3538 |
| M2F + A131Q + V177Q + F93L + P186A | 3539 |
| M2F + A131Q + V177Q + T135E + L253I | 3540 |
| M2F + A131Q + V177Q + F148M | 3541 |
| M2F + V177E + L253I + M49F + D53G | 3542 |
| M2F + V177E + L253I + M49F + L57I | 3543 |
| M2F + V177E + L253I + M49F + S89A | 3544 |
| M2F + V177E + L253I + M49F | 3545 |
| M2F + V177E + L253I + D53G + L57I | 3546 |
| M2F + V177E + L253I + D53G + T128M | 3547 |
| M2F + V177E + L253I + D53G + F148M | 3548 |
| M2F + V177E + L253I + D53G + P186A | 3549 |
| M2F + V177E + L253I + D53S + D56P | 3550 |
| M2F + V177E + L253I + D53S + P186A | 3551 |
| M2F + V177E + L253I + L57I + S89A | 3552 |
| M2F + V177E + L253I + L57I + S238A | 3553 |
| M2F + V177E + L253I + F93L + F148M | 3554 |
| M2F + V177E + L253I + F93L + P186A | 3555 |
| M2F + V177E + L253I + A131Q + F148M | 3556 |
| M2F + V177E + L253I + A131Q | 3557 |
| M2F + I112V | 3558 |
| M2F + P114T | 3559 |
| M2F + I115V | 3560 |
| M2F + P116G | 3561 |
| M2F + T117D | 3562 |
| M2F + E127K | 3563 |
| M2F + Q130R | 3564 |
| M2F + A131R | 3565 |
| M2F + K140E | 3566 |
| M2F + F148I | 3567 |
| M2F + F148L | 3568 |
| M2F + P154R | 3569 |
| M2F + P176A | 3570 |
| M2F + F185W | 3571 |
| M2F + A192G | 3572 |
| M2F + V202A | 3573 |
| M2F + I112V + P114T | 3574 |
| M2F + I112V + I115V | 3575 |
| M2F + I112V + P116G | 3576 |
| M2F + I112V + T117D | 3577 |
| M2F + I112V + E127K | 3578 |
| M2F + I112V + Q130R | 3579 |
| M2F + I112V + A131R | 3580 |
| M2F + I112V + K140E | 3581 |
| M2F + I112V + F148 | 3582 |
| M2F + I112V + F148L | 3583 |
| M2F + I112V + P154R | 3584 |
| M2F + I112V + P176A | 3585 |
| M2F + I112V + F185W | 3586 |
| M2F + I112V + A192G | 3587 |
| M2F + I112V + V202A | 3588 |
| M2F + P114T + I112V | 3589 |
| M2F + P114T + I115V | 3590 |
| M2F + P114T + P116G | 3591 |
| M2F + P114T + T117D | 3592 |
| M2F + P114T + E127K | 3593 |
| M2F + P114T + Q130R | 3594 |
| M2F + P114T + A131R | 3595 |
| M2F + P114T + K140E | 3596 |
| M2F + P114T + F148I | 3597 |
| M2F + P114T + F148L | 3598 |
| M2F + P114T + P154R | 3599 |
| M2F + P114T + P176A | 3600 |
| M2F + P114T + F185W | 3601 |
| M2F + P114T + A192G | 3602 |
| M2F + P114T + V202A | 3603 |
| M2F + I115V + I112V | 3604 |
| M2F + I115V + P114T | 3605 |
| M2F + I115V + P116G | 3606 |
| M2F + I115V + T117D | 3607 |
| M2F + I115V + E127K | 3608 |
| M2F + I115V + Q130R | 3609 |
| M2F + I115V + A131R | 3610 |
| M2F + I115V + K140E | 3611 |
| M2F + I115V + F148I | 3612 |
| M2F + I115V + F148L | 3613 |
| M2F + I115V + P154R | 3614 |
| M2F + I115V + P176A | 3615 |
| M2F + I115V + F185W | 3616 |
| M2F + I115V + A192G | 3617 |
| M2F + I115V + V202A | 3618 |
| M2F + P116G + I112V | 3619 |
| M2F + P116G + P114T | 3620 |
| M2F + P116G + I115V | 3621 |
| M2F + P116G + T117D | 3622 |
| M2F + P116G + E127K | 3623 |
| M2F + P116G + Q130R | 3624 |
| M2F + P116G + A131R | 3625 |
| M2F + P116G + K140E | 3626 |
| M2F + P116G + F148 | 3627 |
| M2F + P116G + F148L | 3628 |
| M2F + P116G + P154R | 3629 |
| M2F + P116G + P176A | 3630 |
| M2F + P116G + F185W | 3631 |
| M2F + P116G + A192G | 3632 |
| M2F + P116G + V202A | 3633 |
| M2F + T117D + I112V | 3634 |
| M2F + T117D + P114T | 3635 |
| M2F + T117D + I115V | 3636 |
| M2F + T117D + P116G | 3637 |
| M2F + T117D + E127K | 3638 |
| M2F + T117D + Q130R | 3639 |
| M2F + T117D + A131R | 3640 |
| M2F + T117D + K140E | 3641 |
| M2L + D53G + I112V | 3642 |
| M2L + D53G + P114T | 3643 |
| M2L + D53G + I115V | 3644 |
| M2L + D53G + P116G | 3645 |
| M2L + D53G + T117D | 3646 |
| M2L + D53G + E127K | 3647 |
| M2L + D53G + Q130R | 3648 |
| M2L + D53G + A131R | 3649 |
| M2L + D53G + K140E | 3650 |
| M2L + D53G + F148I | 3651 |
| M2L + D53G + F148L | 3652 |
| M2L + D53G + P154R | 3653 |
| M2L + D53G + P176A | 3654 |
| M2L + D53G + F185W | 3655 |
| M2L + D53G + A192G | 3656 |
| M2L + D53G + V202A | 3657 |
| M2L + D53G + I112V + P114T | 3658 |
| M2L + D53G + I112V + I115V | 3659 |
| M2L + D53G + I112V + P116G | 3660 |
| M2L + D53G + I112V + T117D | 3661 |
| M2L + D53G + I112V + E127K | 3662 |
| M2L + D53G + I112V + Q130R | 3663 |
| M2L + D53G + I112V + A131R | 3664 |
| M2L + D53G + I112V + K140E | 3665 |
| M2L + D53G + I112V + F148 | 3666 |
| M2L + D53G + I112V + F148L | 3667 |
| M2L + D53G + I112V + P154R | 3668 |
| M2L + D53G + I112V + P176A | 3669 |
| M2L + D53G + I112V + F185W | 3670 |
| M2L + D53G + I112V + A192G | 3671 |
| M2L + D53G + I112V + V202A | 3672 |
| M2L + D53G + P114T + I112V | 3673 |
| M2L + D53G + P114T + I115V | 3674 |
| M2L + D53G + P114T + P116G | 3675 |
| M2L + D53G + P114T + T117D | 3676 |
| M2L + D53G + P114T + E127K | 3677 |
| M2L + D53G + P114T + Q130R | 3678 |
| M2L + D53G + P114T + A131R | 3679 |
| M2L + D53G + P114T + K140E | 3680 |
| M2L + D53G + P114T + F148I | 3681 |
| M2L + D53G + P114T + F148L | 3682 |
| M2L + D53G + P114T + P154R | 3683 |
| M2L + D53G + P114T + P176A | 3684 |
| M2L + D53G + P114T + F185W | 3685 |
| M2L + D53G + P114T + A192G | 3686 |
| M2L + D53G + P114T + V202A | 3687 |
| M2L + D53G + I115V + I112V | 3688 |
| M2L + D53G + I115V + P114T | 3689 |
| M2L + D53G + I115V + P116G | 3690 |
| M2L + D53G + I115V + T117D | 3691 |
| M2L + D53G + I115V + E127K | 3692 |
| M2L + D53G + I115V + Q130R | 3693 |
| M2L + D53G + I115V + A131R | 3694 |
| M2L + D53G + I115V + K140E | 3695 |
| M2L + D53G + I115V + F148 | 3696 |
| M2L + D53G + I115V + F148L | 3697 |
| M2L + D53G + I115V + P154R | 3698 |
| M2L + D53G + I115V + P176A | 3699 |
| M2L + D53G + I115V + F185W | 3700 |
| M2L + D53G + I115V + A192G | 3701 |
| M2L + D53G + I115V + V202A | 3702 |
| M2L + D53G + P116G + I112V | 3703 |
| M2L + D53G + P116G + P114T | 3704 |
| M2L + D53G + P116G + I115V | 3705 |
| M2L + D53G + P116G + T117D | 3706 |
| M2L + D53G + P116G + E127K | 3707 |
| M2L + D53G + P116G + Q130R | 3708 |
| M2L + D53G + P116G + A131R | 3709 |
| M2L + D53G + P116G + K140E | 3710 |
| M2L + D53G + P116G + F148 | 3711 |
| M2L + D53G + P116G + F148L | 3712 |
| M2L + D53G + P116G + P154R | 3713 |
| M2L + D53G + P116G + P176A | 3714 |
| M2L + D53G + P116G + F185W | 3715 |
| M2L + D53G + P116G + A192G | 3716 |
| M2L + D53G + P116G + V202A | 3717 |
| M2L + D53G + T117D + I112V | 3718 |
| M2L + D53G + T117D + P114T | 3719 |
| M2L + D53G + T117D + I115V | 3720 |
| M2L + D53G + T117D + P116G | 3721 |
| M2L + D53G + T117D + E127K | 3722 |
| M2L + D53G + T117D + Q130R | 3723 |
| M2L + D53G + T117D + A131R | 3724 |
| M2L + D53G + T117D + K140E | 3725 |
| M2F + T117D + F148I | 3726 |
| M2F + T117D + F148L | 3727 |
| M2F + T117D + P154R | 3728 |
| M2F + T117D + P176A | 3729 |
| M2F + T117D + F185W | 3730 |
| M2F + T117D + A192G | 3731 |
| M2F + T117D + V202A | 3732 |
| M2F + E127K + I112V | 3733 |
| M2F + E127K + P114T | 3734 |
| M2F + E127K + I115V | 3735 |
| M2F + E127K + P116G | 3736 |
| M2F + E127K + T117D | 3737 |
| M2F + E127K + Q130R | 3738 |
| M2F + E127K + A131R | 3739 |
| M2F + E127K + K140E | 3740 |
| M2F + E127K + F148I | 3741 |
| M2F + E127K + F148L | 3742 |
| M2F + E127K + P154R | 3743 |
| M2F + E127K + P176A | 3744 |
| M2F + E127K + F185W | 3745 |
| M2F + E127K + A192G | 3746 |
| M2F + E127K + V202A | 3747 |
| M2F + Q130R + I112V | 3748 |
| M2F + Q130R + P114T | 3749 |
| M2F + Q130R + I115V | 3750 |
| M2F + Q130R + P116G | 3751 |
| M2F + Q130R + T117D | 3752 |
| M2F + Q130R + E127K | 3753 |
| M2F + Q130R + A131R | 3754 |
| M2F + Q130R + K140E | 3755 |
| M2F + Q130R + F148 | 3756 |
| M2F + Q130R + F148L | 3757 |
| M2F + Q130R + P154R | 3758 |
| M2F + Q130R + P176A | 3759 |
| M2F + Q130R + F185W | 3760 |
| M2F + Q130R + A192G | 3761 |
| M2F + Q130R + V202A | 3762 |
| M2F + A131R + I112V | 3763 |
| M2F + A131R + P114T | 3764 |
| M2F + A131R + I115V | 3765 |
| M2F + A131R + P116G | 3766 |
| M2F + A131R + T117D | 3767 |
| M2F + A131R + E127K | 3768 |
| M2F + A131R + Q130R | 3769 |
| M2F + A131R + K140E | 3770 |
| M2F + A131R + F148 | 3771 |
| M2F + A131R + F148L | 3772 |
| M2F + A131R + P154R | 3773 |
| M2F + A131R + P176A | 3774 |
| M2F + A131R + F185W | 3775 |
| M2F + A131R + A192G | 3776 |
| M2F + A131R + V202A | 3777 |
| M2F + K140E + I112V | 3778 |
| M2F + K140E + P114T | 3779 |
| M2F + K140E + I115V | 3780 |
| M2F + K140E + P116G | 3781 |
| M2F + K140E + T117D | 3782 |
| M2F + K140E + E127K | 3783 |
| M2F + K140E + Q130R | 3784 |
| M2F + K140E + A131R | 3785 |
| M2F + K140E + F1481 | 3786 |
| M2F + K140E + F148L | 3787 |
| M2F + K140E + P154R | 3788 |
| M2F + K140E + P176A | 3789 |
| M2F + K140E + F185W | 3790 |
| M2F + K140E + A192G | 3791 |
| M2F + K140E + V202A | 3792 |
| M2F + F148I + I112V | 3793 |
| M2F + F148I + P114T | 3794 |
| M2F + F148I + I115V | 3795 |
| M2F + F148I + P116G | 3796 |
| M2F + F148I + T117D | 3797 |
| M2F + F148I + E127K | 3798 |
| M2F + F148I + Q130R | 3799 |
| M2F + F148I + A131R | 3800 |
| M2F + F148I + K140E | 3801 |
| M2F + F148I + P154R | 3802 |
| M2F + F148I + P176A | 3803 |
| M2F + F148I + F185W | 3804 |
| M2F + F148I + A192G | 3805 |
| M2F + F148I + V202A | 3806 |
| M2F + F148L + I112V | 3807 |
| M2F + F148L + P114T | 3808 |
| M2F + F148L + I115V | 3809 |
| M2L + D53G + T117D + F148 | 3810 |
| M2L + D53G + T117D + F148L | 3811 |
| M2L + D53G + T117D + P154R | 3812 |
| M2L + D53G + T117D + P176A | 3813 |
| M2L + D53G + T117D + F185W | 3814 |
| M2L + D53G + T117D + A192G | 3815 |
| M2L + D53G + T117D + V202A | 3816 |
| M2L + D53G + E127K + I112V | 3817 |
| M2L + D53G + E127K + P114T | 3818 |
| M2L + D53G + E127K + I115V | 3819 |
| M2L + D53G + E127K + P116G | 3820 |
| M2L + D53G + E127K + T117D | 3821 |
| M2L + D53G + E127K + Q130R | 3822 |
| M2L + D53G + E127K + A131R | 3823 |
| M2L + D53G + E127K + K140E | 3824 |
| M2L + D53G + E127K + F148 | 3825 |
| M2L + D53G + E127K + F148L | 3826 |
| M2L + D53G + E127K + P154R | 3827 |
| M2L + D53G + E127K + P176A | 3828 |
| M2L + D53G + E127K + F185W | 3829 |
| M2L + D53G + E127K + A192G | 3830 |
| M2L + D53G + E127K + V202A | 3831 |
| M2L + D53G + Q130R + I112V | 3832 |
| M2L + D53G + Q130R + P114T | 3833 |
| M2L + D53G + Q130R + I115V | 3834 |
| M2L + D53G + Q130R + P116G | 3835 |
| M2L + D53G + Q130R + T117D | 3836 |
| M2L + D53G + Q130R + E127K | 3837 |
| M2L + D53G + Q130R + A131R | 3838 |
| M2L + D53G + Q130R + K140E | 3839 |
| M2L + D53G + Q130R + F148 | 3840 |
| M2L + D53G + Q130R + F148L | 3841 |
| M2L + D53G + Q130R + P154R | 3842 |
| M2L + D53G + Q130R + P176A | 3843 |
| M2L + D53G + Q130R + F185W | 3844 |
| M2L + D53G + Q130R + A192G | 3845 |
| M2L + D53G + Q130R + V202A | 3846 |
| M2L + D53G + A131R + I112V | 3847 |
| M2L + D53G + A131R + P114T | 3848 |
| M2L + D53G + A131R + I115V | 3849 |
| M2L + D53G + A131R + P116G | 3850 |
| M2L + D53G + A131R + T117D | 3851 |
| M2L + D53G + A131R + E127K | 3852 |
| M2L + D53G + A131R + Q130R | 3853 |
| M2L + D53G + A131R + K140E | 3854 |
| M2L + D53G + A131R + F148I | 3855 |
| M2L + D53G + A131R + F148L | 3856 |
| M2L + D53G + A131R + P154R | 3857 |
| M2L + D53G + A131R + P176A | 3858 |
| M2L + D53G + A131R + F185W | 3859 |
| M2L + D53G + A131R + A192G | 3860 |
| M2L + D53G + A131R + V202A | 3861 |
| M2L + D53G + K140E + I112V | 3862 |
| M2L + D53G + K140E + P114T | 3863 |
| M2L + D53G + K140E + I115V | 3864 |
| M2L + D53G + K140E + P116G | 3865 |
| M2L + D53G + K140E + T117D | 3866 |
| M2L + D53G + K140E + E127K | 3867 |
| M2L + D53G + K140E + Q130R | 3868 |
| M2L + D53G + K140E + A131R | 3869 |
| M2L + D53G + K140E + F148I | 3870 |
| M2L + D53G + K140E + F148L | 3871 |
| M2L + D53G + K140E + P154R | 3872 |
| M2L + D53G + K140E + P176A | 3873 |
| M2L + D53G + K140E + F185W | 3874 |
| M2L + D53G + K140E + A192G | 3875 |
| M2L + D53G + K140E + V202A | 3876 |
| M2L + D53G + F1481 + I112V | 3877 |
| M2L + D53G + F1481 + P114T | 3878 |
| M2L + D53G + F1481 + I115V | 3879 |
| M2L + D53G + F1481 + P116G | 3880 |
| M2L + D53G + F1481 + T117D | 3881 |
| M2L + D53G + F1481 + E127K | 3882 |
| M2L + D53G + F1481 + Q130R | 3883 |
| M2L + D53G + F1481 + A131R | 3884 |
| M2L + D53G + F1481 + K140E | 3885 |
| M2L + D53G + F1481 + P154R | 3886 |
| M2L + D53G + F1481 + P176A | 3887 |
| M2L + D53G + F1481 + F185W | 3888 |
| M2L + D53G + F1481 + A192G | 3889 |
| M2L + D53G + F1481 + V202A | 3890 |
| M2L + D53G + F148L + I112V | 3891 |
| M2L + D53G + F148L + P114T | 3892 |
| M2L + D53G + F148L + I115V | 3893 |
| M2F + D53G + V7E | 3894 |
| M2F + D53G + E79N | 3895 |
| M2F + D53G + I84V | 3896 |
| M2F + D53G + F93L | 3897 |
| M2F + D53G + L201I | 3898 |
| M2F + D53G + E203D | 3899 |
| M2F + D53G + S264A | 3900 |
| M2F + D53G + V7E + S264A | 3901 |
| M2F + D53G + L201I + V7E | 3902 |
| M2F + D53G + L201I + E79N | 3903 |
| M2F + D53G + L201I + I84V | 3904 |
| M2F + D53G + L201I + F93L | 3905 |
| M2F + D53G + L201I + P116G | 3906 |
| M2F + D53G + L201I + T117D | 3907 |
| M2F + D53G + L201I + A131R | 3908 |
| M2F + D53G + L201I + K140E | 3909 |
| M2F + D53G + E203D + V7E | 3910 |
| M2F + D53G + E203D + E79N | 3911 |
| M2F + D53G + E203D + I84V | 3912 |
| M2F + D53G + E203D + F93L | 3913 |
| M2F + D53G + E203D + P116G | 3914 |
| M2F + D53G + E203D + T117D | 3915 |
| M2F + D53G + E203D + A131R | 3916 |
| M2F + D53G + L201I + E203D + V7E | 3917 |
| M2F + D53G + L201I + E203D + E79N | 3918 |
| M2F + D53G + L201I + E203D + I84V | 3919 |
| M2F + D53G + L201I + E203D + F93L | 3920 |
| M2F + D53G + L201I + E203D + P116G | 3921 |
| M2F + D53G + L201I + E203D + T117D | 3922 |
| M2F + D53G + L201I + E203D + A131R | 3923 |
| M2F + D53G + L201I + I84V + F93L + K140E | 3924 |
| M2F + D53G + L201I + I84V + F93L + P116G | 3925 |
| M2F + D53G + L201I + A131R + P116G | 3926 |
| M2F + D53G + I84V + F93L + K140E | 3927 |
| M2F + D53G + I84V + F93L + P116G | 3928 |
| M2F + D53G + A131R + P116G | 3929 |
| M2F + K140E + V7E | 3930 |
| M2F + K140E + P37S | 3931 |
| M2F + K140E + D53G + V177A | 3932 |
| M2F + K140E + D53G + E79K | 3933 |
| M2F + K140E + G58E | 3934 |
| M2F + K140E + P116S | 3935 |
| M2F + K140E + T135D | 3936 |
| M2F + K140E + E165H | 3937 |
| M2F + K140E + L174R | 3938 |
| M2F + K140E + V177D | 3939 |
| M2F + K140E + V177Q + S238A | 3940 |
| M2F + K140E + V177A | 3941 |
| M2F + K140E + W183Y | 3942 |
| M2F + K140E + A196P | 3943 |
| M2F + K140E + L201I | 3944 |
| M2F + K140E + E203D | 3945 |
| M2F + K140E + K243T | 3946 |
| M2F + K140E + S264A | 3947 |
| M2F + K140E + K97Q | 3948 |
| M2F + D53G + L57I + V177E + S238A | 3949 |
| Q145H + P154R | 3950 |
| K140E + Q145H + P154R | 3951 |
| D53G + Q145H + P154R | 3952 |
| D53G + K140E + Q145H + P154R | 3953 |
| M2F + D53G + K140E + V7E | 3954 |
| M2F + D53G + K140E + P37E | 3955 |
| M2F + D53G + K140E + P37G | 3956 |
| M2F + D53G + K140E + P37S | 3957 |
| M2F + D53G + K140E + G58A | 3958 |
| M2F + D53G + K140E + G58P | 3959 |
| M2F + D53G + K140E + G58S | 3960 |
| M2F + D53G + K140E + G58D | 3961 |
| M2F + D53G + K140E + G58E | 3962 |
| M2F + D53G + K140E + M68V | 3963 |
| M2F + D53G + K140E + E73Q | 3964 |
| M2F + D53G + K140E + E79N | 3965 |
| M2F + D53G + K140E + E79D | 3966 |
| M2F + D53G + K140E + E79K | 3967 |
| M2F + D53G + K140E + K97R | 3968 |
| M2F + D53G + K140E + K104V | 3969 |
| M2F + D53G + K140E + P116S | 3970 |
| M2F + D53G + K140E + P116A | 3971 |
| M2F + D53G + K140E + P116G | 3972 |
| M2F + D53G + K140E + T117D | 3973 |
| M2F + D53G + K140E + T117S | 3974 |
| M2F + D53G + K140E + E123A | 3975 |
| M2F + D53G + K140E + E127S | 3976 |
| M2F + D53G + K140E + E127K | 3977 |
| M2F + D53G + K140E + E127Q | 3978 |
| M2F + D53G + K140E + A131R | 3979 |
| M2F + D53G + K140E + A131S | 3980 |
| M2F + D53G + K140S | 3981 |
| M2F + D53G + K140E + E163D | 3982 |
| M2F + D53G + K140E + D167A | 3983 |
| M2F + D53G + K140E + D167Q | 3984 |
| M2F + D53G + K140E + L174R | 3985 |
| M2F + D53G + K140E + N175S | 3986 |
| M2F + D53G + K140E + A192D | 3987 |
| M2F + D53G + K140E + A192G | 3988 |
| M2F + D53G + K140E + L201I | 3989 |
| M2F + D53G + K140E + E203D | 3990 |
| M2F + D53G + K140E + E203Q | 3991 |
| M2F + D53G + K140E + E203N | 3992 |
| M2F + D53G + K140E + H210R | 3993 |
| M2F + D53G + K140E + R234E | 3994 |
| M2F + D53G + K140E + K243T | 3995 |
| M2F + D53G + K140E + K243R | 3996 |
| M2F + D53G + K140E + D260Q | 3997 |
| M2F + D53G + K140E + D260G | 3998 |
| M2F + D53G + K140E + S264A | 3999 |
| M2F + D53G + K140E + S264E | 4000 |
| M2F + D53G + K140E + S264K | 4001 |
| M2F + D53G + K140E + E265Q | 4002 |
| M2F + D53G + K140E + A267V | 4003 |
| M2F + D53G + K140E + A267R | 4004 |
| M2F + D53G + K140E + L273Q | 4005 |
| M2F + D53G + K140E + L273H | 4006 |
| M2F + D53G + K140E + 1275T | 4007 |
| M2F + D53G + K140E + S276E | 4008 |
| M2F + D53G + K140E + S276P | 4009 |
| M2F + M49F + D53G + V177E | 4010 |
| M2F + V7E + T117D + A131R + S271K | 4011 |
| M2F + S271K | 4012 |
| M2F + A200K + W220F | 4013 |
| M2F + M68V + A131R + W220F + S271K | 4014 |
| M2F + V7E + V177E + W220F + S271K | 4015 |
| M2F + M68V + T117D + A200K | 4016 |
| M2F + V7E + T117D + V177E + A200K | 4017 |
| M2F + W220F | 4018 |
| M2F + V7E + M49F + D53G + M68V + S271K | 4019 |
| M2F + M49F + D53G + T117D | 4020 |
| M2F + V7E + M49F + D53G + A200K | 4021 |
| M2F + V7E + M49F + D53G + M68V + T117D + V177E | 4022 |
| M2F + V7E + A200K + W220F | 4023 |
| M2F + V7E + T117D + A200K + S271K | 4024 |
| M2F + V7E + M68V + T117D + A131R + A200K + W220F | 4025 |
| M2F + T117D + A131R + V177E + A200K + S271K | 4026 |
| M2F + M68V + A131R + V177E + S271K | 4027 |
| M2F + M68V | 4028 |
| M2F + M49F + D53G + M68V + T117D + S271K | 4029 |
| M2F + T117D + A131R + V177E + W220F | 4030 |
| M2F + V177E + A200K + W220F + S271K | 4031 |
| M2F + M68V + A200K + S271K | 4032 |
| M2F + V7E + T117D + A131R + W220F | 4033 |
| M2F + V7E + M68V + V177E + W220F + S271K | 4034 |
| M2F + M49F + D53G + M68V + A131R + S271K | 4035 |
| M2F + M68V + A200K + W220F + S271K | 4036 |
| M2F + V7E | 4037 |
| M2F + V7E + M49F + D53G + T117D + V177E + A200K | 4038 |
| M2F + V7E + M68V + T117D + V177E + A200K + S271K | 4039 |
| M2F + M68V + T117D + A131R | 4040 |
| M2F + M68V + T117D + W220F | 4041 |
| M2F + V177E + A200K | 4042 |
| M2F + M68V + T117D + A131R + A200K + W220F + S271K | 4043 |
| M2F + V7E + M49F + D53G + T117D + A131R + A200K + W220F | 4044 |
| M2F + V7E + M49F + D53G + M68V + A131R + V177E + W220F | 4045 |
| M2F + M68V + T117D + A131R + W220F | 4046 |
| M2F + T117D + A131R + V177E + W220F + S271K | 4047 |
| M2F + M49F + D53G + A131R | 4048 |
| M2F + V7E + M49F + D53G + A131R + V177E + S271K | 4049 |
| M2F + V7E + T117D + A131R + V177E | 4050 |
| M2F + M68V + V177E + W220F + S271K | 4051 |
| M2F + M49F + D53G + T117D + A131R + A200K + W220F + S271K | 4052 |
| M2F + V7E + M68V + T117D + W220F | 4053 |
| M2F + T117D + A200K | 4054 |
| M2F + M68V + T117D + A131R + V177E + A200K + W220F | 4055 |
| M2F + V7E + A131R | 4056 |
| M2F + T117D + S271K | 4057 |
| M2F + V7E + M49F + D53G + V177E + A200K | 4058 |
| M2F + M49F + D53G + M68V + A131R + A200K + W220F + S271K | 4059 |
| M2F + V7E + M68V + A200K + W220F + S271K | 4060 |
| M2F + V7E + M68V + A131R + A200K + S271K | 4061 |
| M2F + M49F + D53G + T117D + V177E + A200K + W220F | 4062 |
| M2F + V177E + W220F + S271K | 4063 |
| M2F + M68V + A200K | 4064 |

TABLE 4
Additional exemplary constructs

| SEQ ID NO | Construct |
|---|---|
| 4065 | FKBP-15xGly/Ser-HiBiT |
| 4066 | 6xHis-HaloTag7 |
| 4067 | 6xHis-3xGly/Ser-FKBP-15xGly/Ser-HaloTag[3-19] |
| 4068 | 6xHis-3xGly/Ser-FKBP-15xGly/Ser-HaloTag[3-19]-5xGly/Ser-VS-HiBiT |
| 4069 | HaloTag[22-297](M2F)-6xGly/Ser-6xHis |
| 4070 | HaloTag[22-297](M2F)-12xGly/Ser-LgBiT |
| 4071 | LgBiT-10xGly/Ser-HaloTag[22-297](M2F) |
| 4072 | HaloTag[22-297](M2F + M49F + D53G)-12xGly/Ser-LgBiT |
| 4073 | HaloTag[22-297](M2F + M49F + L57I)-12xGly/Ser-LgBiT |
| 4074 | HaloTag[22-297](M2F + M49F + S89A)-12xGly/Ser-LgBiT |
| 4075 | HaloTag[22-297](M2F + D53S + D56P)-12xGly/Ser-LgBiT |
| 4076 | HaloTag[22-297](M2F + D53G + V177E)-12xGly/Ser-LgBiT |
| 4077 | HaloTag[22-297](M2L)-12xGly/Ser-LgBiT |
| 4078 | HaloTag[22-297](M2F + D53S)-12xGly/Ser-LgBiT |
| 4079 | HaloTag[22-297](M2F + D56P)-12xGly/Ser-LgBiT |
| 4080 | HaloTag[22-297](M2F + E79K)-12xGly/Ser-LgBiT |
| 4081 | HaloTag[22-297](M2F + F93L)-12xGly/Ser-LgBiT |
| 4082 | HaloTag[22-297](M2F + T128M)-12xGly/Ser-LgBiT |
| 4083 | HaloTag[22-297](M2F + A131Q)-12xGly/Ser-LgBiT |
| 4084 | HaloTag[22-297](M2F + F148M)-12xGly/Ser-LgBiT |
| 4085 | HaloTag[22-297](M2F + V177Q)-12xGly/Ser-LgBiT |
| 4086 | HaloTag[22-297](M2F + P186A)-12xGly/Ser-LgBiT |
| 4087 | HaloTag[22-297](M2F + P186V)-12xGly/Ser-LgBiT |
| 4088 | HaloTag[22-297](M2F + S238A)-12xGly/Ser-LgBiT |
| 4089 | HaloTag[22-297](M2F + L253I)-12xGly/Ser-LgBiT |
| 4090 | EGFP-15xGly/Ser-HT[3-19]-10xGly/Ser-VSHiBiT |
| 4091 | HaloTag[22-297](M2F)-12xGly/Ser-LgBiT-3xGly/Ser-6xHis |
| 4092 | HaloTag[22-297](M2F + D53G + F148M)-12xGly/Ser-LgBiT-3xGly/Ser-6xHis |
| 4093 | HaloTag[22-297](M2F + D53G + V177E)-12xGly/Ser-LgBiT-3xGly/Ser-6xHis |
| 4094 | HaloTag[22-297](M2F + F148M + V177E)-12xGly/Ser-LgBiT-3xGly/Ser-6xHis |
| 4095 | 6xHis-3xGly/Ser-FKBP-15xGly/Ser-HaloTag[3-19]-VS-HiBiT |
| 4096 | 6xHis-3xGly/Ser-FKBP-15xGly/Ser-HaloTag[3-19]-2xGly/Ser-VS-HiBiT |
| 4097 | 6xHis-3xGly/Ser-FKBP-15xGly/Ser-HaloTag[3-19]-4xGly/Ser-VS-HiBiT |
| 4098 | 6xHis-3xGly/Ser-FKBP-15xGly/Ser-HaloTag[3-19]-6xGly/Ser-VS-HiBiT |
| 4099 | 6xHis-3xGly/Ser-FKBP-15xGly/Ser-HaloTag[3-19]-8xGly/Ser-VS-HiBiT |
| 4100 | 6xHis-3xGly/Ser-FKBP-15xGly/Ser-HaloTag[3-19]-10xGly/Ser-VS-HiBiT |
| 4101 | 6xHis-3xGly/Ser-FKBP-15xGly/Ser-HaloTag[3-19]-12xGly/Ser-VS-HiBiT |
| 4102 | 6xHis-3xGly/Ser-FKBP-15xGly/Ser-HaloTag[3-19]-15xGly/Ser-VS-HiBiT |
| 4103 | 6xHis-3xGly/Ser-FKBP-15xGly/Ser-VS-HiBiT-HaloTag[3-19] |
| 4104 | 6xHis-3xGly/Ser-FKBP-15xGly/Ser-VS-HiBiT-2xGly/Ser-HaloTag[3-19] |
| 4105 | 6xHis-3xGly/Ser-FKBP-15xGly/Ser-VS-HiBiT-4xGly/Ser-HaloTag[3-19] |
| 4106 | 6xHis-3xGly/Ser-FKBP-15xGly/Ser-VS-HiBiT-6xGly/Ser-HaloTag[3-19] |
| 4107 | 6xHis-3xGly/Ser-FKBP-15xGly/Ser-VS-HiBiT-8xGly/Ser-HaloTag[3-19] |
| 4108 | 6xHis-3xGly/Ser-FKBP-15xGly/Ser-VS-HiBiT-12xGly/Ser-HaloTag[3-19] |
| 4109 | 6xHis-3xGly/Ser-FKBP-15xGly/Ser-HaloTag[3-19]-AP-VS-HiBiT |
| 4110 | 6xHis-3xGly/Ser-FKBP-15xGly/Ser-HaloTag[3-19]-KP-VS-HiBiT |
| 4111 | 6xHis-3xGly/Ser-FKBP-15xGly/Ser-HaloTag[3-19]-EP-VS-HiBiT |
| 4112 | 6xHis-3xGly/Ser-FKBP-15xGly/Ser-HaloTag[3-19]-PAPAP-VS-HiBiT |
| 4113 | 6xHis-3xGly/Ser-FKBP-15xGly/Ser-HaloTag[3-19]-PKPKP-VS-HiBiT |
| 4114 | 6xHis-3xGly/Ser-FKBP-15xGly/Ser-HaloTag[3-19]-PEPEP-VS-HiBiT |
| 4115 | 6xHis-3xGly/Ser-FKBP-HaloTag[3-19]-VS-HiBiT |
| 4116 | 6xHis-3xGly/Ser-FKBP-4xGly/Ser-HaloTag[3-19]-VS-HiBiT |
| 4117 | 6xHis-3xGly/Ser-FKBP-8xGly/Ser-HaloTag[3-19]-VS-HiBiT |
| 4118 | 6xHis-3xGly/Ser-FKBP-15xGly/Ser-HaloTag[3-19]-VTING-VS-HiBiT |
| 4119 | 6xHis-3xGly/Ser-FKBP-15xGly/Ser-HaloTag[4-19]-VS-HiBiT |
| 4120 | 6xHis-3xGly/Ser-FKBP-15xGly/Ser-HaloTag[8-19]-VS-HiBiT |
| 4121 | 6xHis-3xGly/Ser-FKBP-15xGly/Ser-HaloTag[3-18]-VS-HiBiT |
| 4122 | 6xHis-3xGly/Ser-FKBP-15xGly/Ser-HaloTag[4-18]-VS-HiBiT |
| 4123 | 6xHis-3xGly/Ser-FKBP-15xGly/Ser-HaloTag[3-17]-VS-HiBiT |
| 4124 | 6xHis-3xGly/Ser-FKBP-15xGly/Ser-HaloTag[4-17]-VS-HiBiT |
| 4125 | 6xHis-3xGly/Ser-FKBP-15xGly/Ser-HaloTag[8-17]-VS-HiBiT |
| 4126 | 6xHis-3xGly/Ser-FKBP-15xGly/Ser-HaloTag[3-19]-VS-HiBiT(K8R + K9R) |
| | 6xHis-3xGly/Ser-FKBP-15xGly/Ser-HaloTag[3-19]-4xGly/Ser-VS- |
| 4127 | HiBiT(K8R + K9R) |
| 4128 | 6xHis-3xGly/Ser-FKBP-15xGly/Ser-VS-HiBiT(K8R + K9R)-HaloTag[3-19] |
| 4129 | 6xHis-3xGly/Ser-FKBP-15xGly/Ser-VS-HiBiT(K8R + K9R)-4xGly/Ser-HaloTag[3-19] |
| 4130 | 6xHis-3xGly/Ser-FKBP-15xGly/Ser-VS-HiBiT(K8R + K9R)-12xGly/Ser-HaloTag[3-19] |
| 4131 | LgBiT |
| 4132 | HaloTag[22-297](M2F + D53S + V177E + M49F)-12xGly/Ser-LgBiT-3xGly/Ser-6XHis |
| 4133 | Aga2-15xGly/Ser-4xGly/Ser-HaloTag[3-19]-4xGly/Ser-VS-HiBiT |
| 4134 | HaloTag[3-19]-VS-HiBiT-15xGly/Ser-FKBP-5xGly/Ser-6xHis |
| 4135 | HaloTag[3-19]-4xGly/Ser-VS-HiBiT-15xGly/Ser-FKBP-5xGly/Ser-6xHis |
| 4136 | HaloTag[3-19]-6xGly/Ser-VS-HiBiT-15xGly/Ser-FKBP-5xGly/Ser-6xHis |
| 4137 | HaloTag[3-19]-8xGly/Ser-VS-HiBiT-15xGly/Ser-FKBP-5xGly/Ser-6xHis |
| 4138 | HaloTag[3-19]-10xGly/Ser-VS-HiBiT-15xGly/Ser-FKBP-5xGly/Ser-6xHis |
| 4139 | HaloTag[3-19]-12xGly/Ser-VS-HiBiT-15xGly/Ser-FKBP-5xGly/Ser-6xHis |
| 4140 | HaloTag[3-19]-15xGly/Ser-VS-HiBiT-15xGly/Ser-FKBP-5xGly/Ser-6xHis |
| 4141 | VS-HiBiT-HaloTag[3-19]-FKBP-5xGly/Ser-6xHis |
| 4142 | VS-HiBiT-2xGly/Ser-HaloTag[3-19]-FKBP-5xGly/Ser-6xHis |
| 4143 | VS-HiBiT-4xGly/Ser-HaloTag[3-19]-FKBP-5xGly/Ser-6xHis |
| 4144 | VS-HiBiT-6xGly/Ser-HaloTag[3-19]-FKBP-5xGly/Ser-6xHis |
| 4145 | VS-HiBiT-8xGly/Ser-HaloTag[3-19]-FKBP-5xGly/Ser-6xHis |
| 4146 | VS-HiBiT-10xGly/Ser-HaloTag[3-19]-FKBP-5xGly/Ser-6xHis |
| 4147 | HaloTag[3-19]-AP-VS-HiBiT-15xGly/Ser-FKBP-5xGly/Ser-6xHis |
| 4148 | HaloTag[3-19]-KP-VS-HiBiT-15xGly/Ser-FKBP-5xGly/Ser-6xHis |
| 4149 | HaloTag[3-19]-EP-VS-HiBiT-15xGly/Ser-FKBP-5xGly/Ser-6xHis |
| 4150 | HaloTag[3-19]-PAPAP-VS-HiBiT-15xGly/Ser-FKBP-5xGly/Ser-6xHis |
| 4151 | HaloTag[3-19]-PKPKP-VS-HiBiT-15xGly/Ser-FKBP-5xGly/Ser-6xHis |
| 4152 | HaloTag[3-19]-3XEAAAK-VS-HiBiT-15xGly/Ser-FKBP-5xGly/Ser-6xHis |
| 4153 | HaloTag[3-19]-VS-HiBiT-FKBP-5xGly/Ser-6xHis |
| 4154 | HaloTag[3-19]-VS-HiBiT-4xGly/Ser-FKBP-5xGly/Ser-6xHis |
| 4155 | HaloTag[3-19]-VS-HiBiT-8xGly/Ser-FKBP-5xGly/Ser-6xHis |
| 4156 | HaloTag[3-19]-VTING-VS-HiBiT-15xGly/Ser-FKBP-5xGly/Ser-6xHis |
| 4157 | HaloTag[3-19]-ING-VS-HiBiT-15xGly/Ser-FKBP-5xGly/Ser-6xHis |
| 4158 | HaloTag[4-19]-VS-HiBiT-15xGly/Ser-FKBP-5xGly/Ser-6xHis |
| 4159 | HaloTag[8-19]-VS-HiBiT-15xGly/Ser-FKBP-5xGly/Ser-6xHis |
| 4160 | HaloTag[3-18]-VS-HiBiT-15xGly/Ser-FKBP-5xGly/Ser-6xHis |
| 4161 | HaloTag[4-18]-VS-HiBiT-15xGly/Ser-FKBP-5xGly/Ser-6xHis |
| 4162 | HaloTag[8-18]-VS-HiBiT-15xGly/Ser-FKBP-5xGly/Ser-6xHis |
| 4163 | HaloTag[3-17]-VS-HiBiT-15xGly/Ser-FKBP-5xGly/Ser-6xHis |
| 4164 | HaloTag[4-17]-VS-HiBiT-15xGly/Ser-FKBP-5xGly/Ser-6xHis |
| 4165 | HaloTag[8-17]-VS-HiBiT-15xGly/Ser-FKBP-5xGly/Ser-6xHis |
| 4166 | HaloTag[3-19]-VS-HiBiT(K8R + K9R)-15xGly/Ser-FKBP-5xGly/Ser-6xHis |
| 4167 | HaloTag[3-19]-4xGly/Ser-VS-HiBiT(K8R + K9R)-FKBP-5xGly/Ser-6xHis |
| 4168 | VS-HiBiT(K8R + K9R)-HaloTag[3-19]-FKBP-5xGly/Ser-6xHis |
| 4169 | VS-HiBiT(K8R + K9R)-4xGly/Ser-HaloTag[3-19]-FKBP-5xGly/Ser-6xHis |
| 4170 | VS-HiBiT(K8R + K9R)-10xGly/Ser-HaloTag[3-19]-FKBP-5xGly/Ser-6xHis |
| 4171 | Aga2-15xGly/Ser-EGFP-4xGly/Ser-HaloTag[3-19]-4xGly/Ser-NVSGWRLFKKISN |
| 4172 | Aga2-15xGly/Ser-EGFP-4xGly/Ser-HaloTag[3-19]-4xGly/Ser-NVTGYRLFKKISN |
| 4173 | Aga2-15xGly/Ser-EGFP-4xGly/Ser-HaloTag[3-19]-4xGly/Ser-VTGYRLFEKIS |
| 4174 | Aga2-15xGly/Ser-EGFP-4xGly/Ser-HaloTag[3-19]-4xGly/Ser-VS-HiBiT |
| 4175 | HaloTag[22-297](M2F + K140E)-12xGly/Ser-LgBiT-3xGly/Ser-6xHis |
| 4176 | HaloTag[22-297](M2F + D53G + K140E)-12xGly/Ser-LgBiT-3xGly/Ser-6xHis |

1. A dual-reporter system comprising:
(a) a tandem peptide tag comprising (i) a peptide component of a bioluminescent complex fused to (ii) a peptide component of a modified dehalogenase complex; and
(b) a tandem polypeptide reporter comprising (i) a polypeptide component of the bioluminescent complex and (ii) a polypeptide component of the modified dehalogenase complex;
wherein the peptide component and the polypeptide component of the bioluminescent complex are capable of interacting to form the bioluminescent complex, and wherein the bioluminescent complex is capable of producing bioluminescence in the presence of a substrate for the bioluminescent complex; and
wherein the peptide component and the polypeptide component of the modified dehalogenase complex are capable of interacting to form the modified dehalogenase complex, and wherein the modified dehalogenase complex is capable of forming a covalent bond with a haloalkyl ligand.

2. The system of claim 1, wherein the tandem polypeptide reporter exhibits high affinity for the tandem peptide tag.

3. The system of claim 2, wherein the peptide component of the bioluminescent complex exhibits high affinity for the polypeptide component of the bioluminescent complex.

4. The system of claim 3, wherein the high affinity is a K_{d} less than 1 μM.

5. The system of claim 4, wherein the high affinity is a K_{d} less than 1 nM.

6. The system of claim 1, wherein the peptide component of the bioluminescent complex has at least 70% identity with SEQ ID NO: 3038.

7. The system of claim 6, wherein the peptide component of the bioluminescent complex has 100% identity with SEQ ID NO: 3038.

8. The system of claim 1, wherein the polypeptide component of the bioluminescent complex has at least 70% identity with SEQ ID NO: 3037.

9. The system of claim 8, wherein the polypeptide component of the bioluminescent complex has 100% identity with SEQ ID NO: 3037.

10. The system of claim 1, wherein the peptide component of the modified dehalogenase complex has at least 70% identity with SEQ ID NO: 3034.

11. The system of claim 10, wherein the peptide component of the modified dehalogenase complex has 100% identity with SEQ ID NO: 3034.

12. The system of claim 1, wherein the polypeptide component of the modified dehalogenase complex has at least 70% identity with SEQ ID NO: 1188.

13. The system of claim 12, wherein the polypeptide component of the modified dehalogenase complex has 100% identity with SEQ ID NO: 1188.

14. The system of claim 1, wherein the tandem peptide tag has at least 70% identity to one of SEQ ID NOS: 3062-3063, 3067-3078, 3092, 3094-3109, or 4177-4181.

15. The system of claim 14, wherein the tandem peptide tag has 100% identity to one of SEQ ID NOS: 3062-3063, 3067-3078, 3092, 3094-3109, or 4177-4181.

16. The system of claim 1, wherein the tandem polypeptide reporter has at least 70% identity to one of SEQ ID NOS: 3110-4064.

17. The system of claim 16, wherein the tandem polypeptide reporter has 100% identity to one of SEQ ID NOS: 3110-4064.

18. The system of claim 1, further comprising the substrate for the bioluminescent complex.

19. The system of claim 1, further comprising the haloalkyl ligand.

20. The system of claim 19, wherein the haloalkyl ligand comprises a haloalkane moiety linked to a fluorophore.

21. The system of claim 20, wherein the fluorophore has an excitation spectrum that overlaps with an emission spectrum of the bioluminescent complex and the substrate.

22. The system of claim 1, wherein the tandem peptide tag is linked to a target element.

23. (canceled)

24. A tandem peptide tag comprising a peptide component of bioluminescent complex fused to a peptide component of modified dehalogenase complex;
wherein the peptide component of the bioluminescent complex is capable of interacting with a polypeptide component of the bioluminescent complex to form the bioluminescent complex, and wherein the bioluminescent complex is capable of producing bioluminescence in the presence of a substrate for the bioluminescent complex; and
wherein the peptide component of the modified dehalogenase complex is capable of interacting with a polypeptide component of the modified dehalogenase complex to form the modified dehalogenase complex, and wherein the modified dehalogenase complex is capable of forming a covalent bond with a haloalkyl ligand.

25-43. (canceled)

44. A tandem polypeptide reporter comprising a polypeptide component of the bioluminescent complex and a polypeptide component of the modified dehalogenase complex;
wherein the polypeptide component of the bioluminescent complex is capable of interacting with a peptide component of the bioluminescent complex to form the bioluminescent complex, and wherein the bioluminescent complex is capable of producing bioluminescence in the presence of a substrate for the bioluminescent complex; and
wherein the polypeptide component of the modified dehalogenase complex is capable of interacting with a peptide component of the modified dehalogenase complex to form the modified dehalogenase complex, and wherein the modified dehalogenase complex is capable of forming a covalent bond with a haloalkyl ligand.

45-60. (canceled)

61. A method of detecting a component of interest in a system, the method comprising:
(a) linking the component of interest to a tandem peptide tag comprising a peptide component of bioluminescent complex fused to a peptide component of modified dehalogenase complex, wherein the peptide component of the bioluminescent complex is capable of interacting with a polypeptide component of the bioluminescent complex to form the bioluminescent complex, wherein the bioluminescent complex is capable of producing bioluminescence in the presence of a substrate for the bioluminescent complex, wherein the peptide component of the modified dehalogenase complex is capable of interacting with a polypeptide component of the modified dehalogenase complex to form the modified dehalogenase complex, and wherein the modified dehalogenase complex is capable of forming a covalent bond with a haloalkyl ligand;
(b) contacting the component of interest linked to the tandem peptide tag with a polypeptide component of a modified dehalogenase complex under condition such that the modified dehalogenase complex is formed;
(c) contacting the modified dehalogenase complex with a haloalkyl ligand comprising a haloalkane linked to a fluorophore; and
(d) detecting fluorescence.

62. A method of detecting a component of interest using a system of claim 1, the method comprising:
(a) linking the component of interest to the tandem peptide tag comprising a peptide component of bioluminescent complex fused to a peptide component of modified dehalogenase complex, wherein the peptide component of the bioluminescent complex is capable of interacting with a polypeptide component of the bioluminescent complex to form the bioluminescent complex, wherein the bioluminescent complex is capable of producing bioluminescence in the presence of a substrate for the bioluminescent complex, wherein the peptide component of the modified dehalogenase complex is capable of interacting with a polypeptide component of the modified dehalogenase complex to form the modified dehalogenase complex, and wherein the modified dehalogenase complex is capable of forming a covalent bond with a haloalkyl ligand;
(b) contacting the component of interest linked to the tandem peptide tag with a polypeptide component of a bioluminescent complex under condition such that the bioluminescent complex is formed;
(c) contacting the bioluminescent complex with a substrate for the bioluminescent complex; and
(d) detecting bioluminescence.

63. A method of detecting a component of interest in a system, the method comprising:
(a) linking the component of interest to a tandem peptide tag comprising a peptide component of bioluminescent complex fused to a peptide component of modified dehalogenase complex, wherein the peptide component of the bioluminescent complex is capable of interacting with a polypeptide component of the bioluminescent complex to form the bioluminescent complex, wherein the bioluminescent complex is capable of producing bioluminescence in the presence of a substrate for the bioluminescent complex, wherein the peptide component of the modified dehalogenase complex is capable of interacting with a polypeptide component of the modified dehalogenase complex to form the modified dehalogenase complex, and wherein the modified dehalogenase complex is capable of forming a covalent bond with a haloalkyl ligand;
(b) contacting the component of interest linked to the tandem peptide tag with a tandem polypeptide reporter comprising (i) the polypeptide component of a bioluminescent complex and (ii) the polypeptide component of a modified dehalogenase complex under condition such that the bioluminescent complex and modified dehalogenase complexes are formed;
(c) contacting the bioluminescent complex with a substrate for the bioluminescent complex and/or a haloalkyl ligand comprising a haloalkane linked to a fluorophore; and
(d) detecting bioluminescence and/or fluorescence.

64. A method of detecting a component of interest in a system, the method comprising:
(a) linking the component of interest to a tandem peptide tag comprising a peptide component of bioluminescent complex fused to a peptide component of modified dehalogenase complex, wherein the peptide component of the bioluminescent complex is capable of interacting with a polypeptide component of the bioluminescent complex to form the bioluminescent complex, wherein the bioluminescent complex is capable of producing bioluminescence in the presence of a substrate for the bioluminescent complex, wherein the peptide component of the modified dehalogenase complex is capable of interacting with a polypeptide component of the modified dehalogenase complex to form the modified dehalogenase complex, and wherein the modified dehalogenase complex is capable of forming a covalent bond with a haloalkyl ligand;
(b) contacting the component of interest linked to the tandem peptide tag with independent polypeptides comprising (i) the polypeptide component of a bioluminescent complex and (ii) the polypeptide component of a modified dehalogenase complex under condition such that the bioluminescent complex and modified dehalogenase complexes are formed;
(c) contacting the bioluminescent complex with a substrate for the bioluminescent complex and/or a haloalkyl ligand comprising a haloalkane linked to a fluorophore; and
(d) detecting bioluminescence and/or fluorescence.

The application's sequence listing, which the Patent Office published only in electronic form, follows.

SEQUENCE LISTING (4176 sequences)

SEQ ID NO: 1 - protein, 297 aa, Synthetic construct
MAEIGTGFPFDPHYVEVLGERMHYVDVGPRDGTPVLFLHGNPTSSYVWRNIIPHVAPTHRCIAPDLIGMGKSDKPDLGYFFDDHVRFMDAFIEALGLEEVVLVIHDWGSALGFHWAKRNPERVKGIAFMEFIRPIPTWDEWPEFARETFQAFRTTDVGRKLIIDQNVFIEGTLPMGVVRPLTEVEMDHYREPFLNPVDREPLWRFPNELPIAGEPANIVALVEEYMDWLHQSPVPKLLFWGTPGVLIPPAEAARLAKSLPNCKAVDIGPGLNLLQEDNPDLIGSEIARWLSTLEISG

SEQ ID NO: 2 - protein, 292 aa, Synthetic construct
TGFPFDPHYVEVLGERMHYVDVGPRDGTPVLFLHGNPTSSYVWRNIIPHVAPTHRCIAPDLIGMGKSDKPDLGYFFDDHVRFMDAFIEALGLEEVVLVIHDWGSALGFHWAKRNPERVKGIAFMEFIRPIPTWDEWPEFARETFQAFRTTDVGRKLIIDQNVFIEGTLPMGVVRPLTEVEMDHYREPFLNPVDREPLWRFPNELPIAGEPANIVALVEEYMDWLHQSPVPKLLFWGTPGVLIPPAEAARLAKSLPNCKAVDIGPGLNLLQEDNPDLIGSEIARWLSTLEISG

SEQ ID NO: 3 - protein, 5 aa, Synthetic construct
MAEIG

SEQ ID NO: 4 - protein, 291 aa, Synthetic construct
GFPFDPHYVEVLGERMHYVDVGPRDGTPVLFLHGNPTSSYVWRNIIPHVAPTHRCIAPDLIGMGKSDKPDLGYFFDDHVRFMDAFIEALGLEEVVLVIHDWGSALGFHWAKRNPERVKGIAFMEFIRPIPTWDEWPEFARETFQAFRTTDVGRKLIIDQNVFIEGTLPMGVVRPLTEVEMDHYREPFLNPVDREPLWRFPNELPIAGEPANIVALVEEYMDWLHQSPVPKLLFWGTPGVLIPPAEAARLAKSLPNCKAVDIGPGLNLLQEDNPDLIGSEIARWLSTLEISG

SEQ ID NO: 5 - protein, 6 aa, Synthetic construct
MAEIGT

SEQ ID NO: 6 - protein, 290 aa, Synthetic construct
FPFDPHYVEVLGERMHYVDVGPRDGTPVLFLHGNPTSSYVWRNIIPHVAPTHRCIAPDLIGMGKSDKPDLGYFFDDHVRFMDAFIEALGLEEVVLVIHDWGSALGFHWAKRNPERVKGIAFMEFIRPIPTWDEWPEFARETFQAFRTTDVGRKLIIDQNVFIEGTLPMGVVRPLTEVEMDHYREPFLNPVDREPLWRFPNELPIAGEPANIVALVEEYMDWLHQSPVPKLLFWGTPGVLIPPAEAARLAKSLPNCKAVDIGPGLNLLQEDNPDLIGSEIARWLSTLEISG

SEQ ID NO: 7 - protein, 7 aa, Synthetic construct
MAEIGTG

SEQ ID NO: 8 - protein, 289 aa, Synthetic construct
PFDPHYVEVLGERMHYVDVGPRDGTPVLFLHGNPTSSYVWRNIIPHVAPTHRCIAPDLIGMGKSDKPDLGYFFDDHVRFMDAFIEALGLEEVVLVIHDWGSALGFHWAKRNPERVKGIAFMEFIRPIPTWDEWPEFARETFQAFRTTDVGRKLIIDQNVFIEGTLPMGVVRPLTEVEMDHYREPFLNPVDREPLWRFPNELPIAGEPANIVALVEEYMDWLHQSPVPKLLFWGTPGVLIPPAEAARLAKSLPNCKAVDIGPGLNLLQEDNPDLIGSEIARWLSTLEISG

SEQ ID NO: 9 - protein, 8 aa, Synthetic construct
MAEIGTGF

SEQ ID NO: 10 - protein, 288 aa, Synthetic construct
FDPHYVEVLGERMHYVDVGPRDGTPVLFLHGNPTSSYVWRNIIPHVAPTHRCIAPDLIGMGKSDKPDLGYFFDDHVRFMDAFIEALGLEEVVLVIHDWGSALGFHWAKRNPERVKGIAFMEFIRPIPTWDEWPEFARETFQAFRTTDVGRKLIIDQNVFIEGTLPMGVVRPLTEVEMDHYREPFLNPVDREPLWRFPNELPIAGEPANIVALVEEYMDWLHQSPVPKLLFWGTPGVLIPPAEAARLAKSLPNCKAVDIGPGLNLLQEDNPDLIGSEIARWLSTLEISG

SEQ ID NO: 11 - protein, 9 aa, Synthetic construct
MAEIGTGFP

SEQ ID NO: 12 - protein, 287 aa, Synthetic construct
DPHYVEVLGERMHYVDVGPRDGTPVLFLHGNPTSSYVWRNIIPHVAPTHRCIAPDLIGMGKSDKPDLGYFFDDHVRFMDAFIEALGLEEVVLVIHDWGSALGFHWAKRNPERVKGIAFMEFIRPIPTWDEWPEFARETFQAFRTTDVGRKLIIDQNVFIEGTLPMGVVRPLTEVEMDHYREPFLNPVDREPLWRFPNELPIAGEPANIVALVEEYMDWLHQSPVPKLLFWGTPGVLIPPAEAARLAKSLPNCKAVDIGPGLNLLQEDNPDLIGSEIARWLSTLEISG

SEQ ID NO: 13 - protein, 10 aa, Synthetic construct
MAEIGTGFPF

SEQ ID NO: 14 - protein, 286 aa, Synthetic construct
PHYVEVLGERMHYVDVGPRDGTPVLFLHGNPTSSYVWRNIIPHVAPTHRCIAPDLIGMGKSDKPDLGYFFDDHVRFMDAFIEALGLEEVVLVIHDWGSALGFHWAKRNPERVKGIAFMEFIRPIPTWDEWPEFARETFQAFRTTDVGRKLIIDQNVFIEGTLPMGVVRPLTEVEMDHYREPFLNPVDREPLWRFPNELPIAGEPANIVALVEEYMDWLHQSPVPKLLFWGTPGVLIPPAEAARLAKSLPNCKAVDIGPGLNLLQEDNPDLIGSEIARWLSTLEISG

SEQ ID NO: 15 - protein, 11 aa, Synthetic construct
MAEIGTGFPFD

SEQ ID NO: 16 - protein, 285 aa, Synthetic construct
HYVEVLGERMHYVDVGPRDGTPVLFLHGNPTSSYVWRNIIPHVAPTHRCIAPDLIGMGKSDKPDLGYFFDDHVRFMDAFIEALGLEEVVLVIHDWGSALGFHWAKRNPERVKGIAFMEFIRPIPTWDEWPEFARETFQAFRTTDVGRKLIIDQNVFIEGTLPMGVVRPLTEVEMDHYREPFLNPVDREPLWRFPNELPIAGEPANIVALVEEYMDWLHQSPVPKLLFWGTPGVLIPPAEAARLAKSLPNCKAVDIGPGLNLLQEDNPDLIGSEIARWLSTLEISG

SEQ ID NO: 17 - protein, 12 aa, Synthetic construct
MAEIGTGFPFDP

SEQ ID NO: 18 - protein, 284 aa, Synthetic construct
YVEVLGERMHYVDVGPRDGTPVLFLHGNPTSSYVWRNIIPHVAPTHRCIAPDLIGMGKSDKPDLGYFFDDHVRFMDAFIEALGLEEVVLVIHDWGSALGFHWAKRNPERVKGIAFMEFIRPIPTWDEWPEFARETFQAFRTTDVGRKLIIDQNVFIEGTLPMGVVRPLTEVEMDHYREPFLNPVDREPLWRFPNELPIAGEPANIVALVEEYMDWLHQSPVPKLLFWGTPGVLIPPAEAARLAKSLPNCKAVDIGPGLNLLQEDNPDLIGSEIARWLSTLEISG

SEQ ID NO: 19 - protein, 13 aa, Synthetic construct
MAEIGTGFPFDPH

SEQ ID NO: 20 - protein, 283 aa, Synthetic construct
VEVLGERMHYVDVGPRDGTPVLFLHGNPTSSYVWRNIIPHVAPTHRCIAPDLIGMGKSDKPDLGYFFDDHVRFMDAFIEALGLEEVVLVIHDWGSALGFHWAKRNPERVKGIAFMEFIRPIPTWDEWPEFARETFQAFRTTDVGRKLIIDQNVFIEGTLPMGVVRPLTEVEMDHYREPFLNPVDREPLWRFPNELPIAGEPANIVALVEEYMDWLHQSPVPKLLFWGTPGVLIPPAEAARLAKSLPNCKAVDIGPGLNLLQEDNPDLIGSEIARWLSTLEISG

SEQ ID NO: 21 - protein, 14 aa, Synthetic construct
MAEIGTGFPFDPHY

SEQ ID NO: 22 - protein, 282 aa, Synthetic construct
EVLGERMHYVDVGPRDGTPVLFLHGNPTSSYVWRNIIPHVAPTHRCIAPDLIGMGKSDKPDLGYFFDDHVRFMDAFIEALGLEEVVLVIHDWGSALGFHWAKRNPERVKGIAFMEFIRPIPTWDEWPEFARETFQAFRTTDVGRKLIIDQNVFIEGTLPMGVVRPLTEVEMDHYREPFLNPVDREPLWRFPNELPIAGEPANIVALVEEYMDWLHQSPVPKLLFWGTPGVLIPPAEAARLAKSLPNCKAVDIGPGLNLLQEDNPDLIGSEIARWLSTLEISG

SEQ ID NO: 23 - protein, 15 aa, Synthetic construct
MAEIGTGFPFDPHYV

SEQ ID NO: 24 - protein, 281 aa, Synthetic construct
VLGERMHYVDVGPRDGTPVLFLHGNPTSSYVWRNIIPHVAPTHRCIAPDLIGMGKSDKPDLGYFFDDHVRFMDAFIEALGLEEVVLVIHDWGSALGFHWAKRNPERVKGIAFMEFIRPIPTWDEWPEFARETFQAFRTTDVGRKLIIDQNVFIEGTLPMGVVRPLTEVEMDHYREPFLNPVDREPLWRFPNELPIAGEPANIVALVEEYMDWLHQSPVPKLLFWGTPGVLIPPAEAARLAKSLPNCKAVDIGPGLNLLQEDNPDLIGSEIARWLSTLEISG

SEQ ID NO: 25 - protein, 16 aa, Synthetic construct
MAEIGTGFPFDPHYVE

SEQ ID NO: 26 - protein, 280 aa, Synthetic construct
LGERMHYVDVGPRDGTPVLFLHGNPTSSYVWRNIIPHVAPTHRCIAPDLIGMGKSDKPDLGYFFDDHVRFMDAFIEALGLEEVVLVIHDWGSALGFHWAKRNPERVKGIAFMEFIRPIPTWDEWPEFARETFQAFRTTDVGRKLIIDQNVFIEGTLPMGVVRPLTEVEMDHYREPFLNPVDREPLWRFPNELPIAGEPANIVALVEEYMDWLHQSPVPKLLFWGTPGVLIPPAEAARLAKSLPNCKAVDIGPGLNLLQEDNPDLIGSEIARWLSTLEISG

SEQ ID NO: 27 - protein, 17 aa, Synthetic construct
MAEIGTGFPFDPHYVEV

SEQ ID NO: 28 - protein, 279 aa, Synthetic construct
GERMHYVDVGPRDGTPVLFLHGNPTSSYVWRNIIPHVAPTHRCIAPDLIGMGKSDKPDLGYFFDDHVRFMDAFIEALGLEEVVLVIHDWGSALGFHWAKRNPERVKGIAFMEFIRPIPTWDEWPEFARETFQAFRTTDVGRKLIIDQNVFIEGTLPMGVVRPLTEVEMDHYREPFLNPVDREPLWRFPNELPIAGEPANIVALVEEYMDWLHQSPVPKLLFWGTPGVLIPPAEAARLAKSLPNCKAVDIGPGLNLLQEDNPDLIGSEIARWLSTLEISG

SEQ ID NO: 29 - protein, 18 aa, Synthetic construct
MAEIGTGFPFDPHYVEVL

SEQ ID NO: 30 - protein, 278 aa, Synthetic construct
ERMHYVDVGPRDGTPVLFLHGNPTSSYVWRNIIPHVAPTHRCIAPDLIGMGKSDKPDLGYFFDDHVRFMDAFIEALGLEEVVLVIHDWGSALGFHWAKRNPERVKGIAFMEFIRPIPTWDEWPEFARETFQAFRTTDVGRKLIIDQNVFIEGTLPMGVVRPLTEVEMDHYREPFLNPVDREPLWRFPNELPIAGEPANIVALVEEYMDWLHQSPVPKLLFWGTPGVLIPPAEAARLAKSLPNCKAVDIGPGLNLLQEDNPDLIGSEIARWLSTLEISG

SEQ ID NO: 31 - protein, 19 aa, Synthetic construct
MAEIGTGFPFDPHYVEVLG

SEQ ID NO: 32 - protein, 277 aa, Synthetic construct
RMHYVDVGPRDGTPVLFLHGNPTSSYVWRNIIPHVAPTHRCIAPDLIGMGKSDKPDLGYFFDDHVRFMDAFIEALGLEEVVLVIHDWGSALGFHWAKRNPERVKGIAFMEFIRPIPTWDEWPEFARETFQAFRTTDVGRKLIIDQNVFIEGTLPMGVVRPLTEVEMDHYREPFLNPVDREPLWRFPNELPIAGEPANIVALVEEYMDWLHQSPVPKLLFWGTPGVLIPPAEAARLAKSLPNCKAVDIGPGLNLLQEDNPDLIGSEIARWLSTLEISG

SEQ ID NO: 33 - protein, 20 aa, Synthetic construct
MAEIGTGFPFDPHYVEVLGE

SEQ ID NO: 34 - protein, 276 aa, Synthetic construct
MHYVDVGPRDGTPVLFLHGNPTSSYVWRNIIPHVAPTHRCIAPDLIGMGKSDKPDLGYFFDDHVRFMDAFIEALGLEEVVLVIHDWGSALGFHWAKRNPERVKGIAFMEFIRPIPTWDEWPEFARETFQAFRTTDVGRKLIIDQNVFIEGTLPMGVVRPLTEVEMDHYREPFLNPVDREPLWRFPNELPIAGEPANIVALVEEYMDWLHQSPVPKLLFWGTPGVLIPPAEAARLAKSLPNCKAVDIGPGLNLLQEDNPDLIGSEIARWLSTLEISG

SEQ ID NO: 35 - protein, 21 aa, Synthetic construct
MAEIGTGFPFDPHYVEVLGER

SEQ ID NO: 36 - protein, 275 aa, Synthetic construct
HYVDVGPRDGTPVLFLHGNPTSSYVWRNIIPHVAPTHRCIAPDLIGMGKSDKPDLGYFFDDHVRFMDAFIEALGLEEVVLVIHDWGSALGFHWAKRNPERVKGIAFMEFIRPIPTWDEWPEFARETFQAFRTTDVGRKLIIDQNVFIEGTLPMGVVRPLTEVEMDHYREPFLNPVDREPLWRFPNELPIAGEPANIVALVEEYMDWLHQSPVPKLLFWGTPGVLIPPAEAARLAKSLPNCKAVDIGPGLNLLQEDNPDLIGSEIARWLSTLEISG

SEQ ID NO: 37 - protein, 22 aa, Synthetic construct
MAEIGTGFPFDPHYVEVLGERM

SEQ ID NO: 38 - protein, 274 aa, Synthetic construct
YVDVGPRDGTPVLFLHGNPTSSYVWRNIIPHVAPTHRCIAPDLIGMGKSDKPDLGYFFDDHVRFMDAFIEALGLEEVVLVIHDWGSALGFHWAKRNPERVKGIAFMEFIRPIPTWDEWPEFARETFQAFRTTDVGRKLIIDQNVFIEGTLPMGVVRPLTEVEMDHYREPFLNPVDREPLWRFPNELPIAGEPANIVALVEEYMDWLHQSPVPKLLFWGTPGVLIPPAEAARLAKSLPNCKAVDIGPGLNLLQEDNPDLIGSEIARWLSTLEISG

SEQ ID NO: 39 - protein, 23 aa, Synthetic construct
MAEIGTGFPFDPHYVEVLGERMH

SEQ ID NO: 40 - protein, 273 aa, Synthetic construct
VDVGPRDGTPVLFLHGNPTSSYVWRNIIPHVAPTHRCIAPDLIGMGKSDKPDLGYFFDDHVRFMDAFIEALGLEEVVLVIHDWGSALGFHWAKRNPERVKGIAFMEFIRPIPTWDEWPEFARETFQAFRTTDVGRKLIIDQNVFIEGTLPMGVVRPLTEVEMDHYREPFLNPVDREPLWRFPNELPIAGEPANIVALVEEYMDWLHQSPVPKLLFWGTPGVLIPPAEAARLAKSLPNCKAVDIGPGLNLLQEDNPDLIGSEIARWLSTLEISG

SEQ ID NO: 41 - protein, 24 aa, Synthetic construct
MAEIGTGFPFDPHYVEVLGERMHY

SEQ ID NO: 42 - protein, 272 aa, Synthetic construct
DVGPRDGTPVLFLHGNPTSSYVWRNIIPHVAPTHRCIAPDLIGMGKSDKPDLGYFFDDHVRFMDAFIEALGLEEVVLVIHDWGSALGFHWAKRNPERVKGIAFMEFIRPIPTWDEWPEFARETFQAFRTTDVGRKLIIDQNVFIEGTLPMGVVRPLTEVEMDHYREPFLNPVDREPLWRFPNELPIAGEPANIVALVEEYMDWLHQSPVPKLLFWGTPGVLIPPAEAARLAKSLPNCKAVDIGPGLNLLQEDNPDLIGSEIARWLSTLEISG

SEQ ID NO: 43 - protein, 25 aa, Synthetic construct
MAEIGTGFPFDPHYVEVLGERMHYV

SEQ ID NO: 44 - protein, 271 aa, Synthetic construct
VGPRDGTPVLFLHGNPTSSYVWRNIIPHVAPTHRCIAPDLIGMGKSDKPDLGYFFDDHVRFMDAFIEALGLEEVVLVIHDWGSALGFHWAKRNPERVKGIAFMEFIRPIPTWDEWPEFARETFQAFRTTDVGRKLIIDQNVFIEGTLPMGVVRPLTEVEMDHYREPFLNPVDREPLWRFPNELPIAGEPANIVALVEEYMDWLHQSPVPKLLFWGTPGVLIPPAEAARLAKSLPNCKAVDIGPGLNLLQEDNPDLIGSEIARWLSTLEISG

SEQ ID NO: 45 - protein, 26 aa, Synthetic construct
MAEIGTGFPFDPHYVEVLGERMHYVD

SEQ ID NO: 46 - protein, 270 aa, Synthetic construct
GPRDGTPVLFLHGNPTSSYVWRNIIPHVAPTHRCIAPDLIGMGKSDKPDLGYFFDDHVRFMDAFIEALGLEEVVLVIHDWGSALGFHWAKRNPERVKGIAFMEFIRPIPTWDEWPEFARETFQAFRTTDVGRKLIIDQNVFIEGTLPMGVVRPLTEVEMDHYREPFLNPVDREPLWRFPNELPIAGEPANIVALVEEYMDWLHQSPVPKLLFWGTPGVLIPPAEAARLAKSLPNCKAVDIGPGLNLLQEDNPDLIGSEIARWLSTLEISG

SEQ ID NO: 47 - protein, 27 aa, Synthetic construct
MAEIGTGFPFDPHYVEVLGERMHYVDV

SEQ ID NO: 48 - protein, 269 aa, Synthetic construct
PRDGTPVLFLHGNPTSSYVWRNIIPHVAPTHRCIAPDLIGMGKSDKPDLGYFFDDHVRFMDAFIEALGLEEVVLVIHDWGSALGFHWAKRNPERVKGIAFMEFIRPIPTWDEWPEFARETFQAFRTTDVGRKLIIDQNVFIEGTLPMGVVRPLTEVEMDHYREPFLNPVDREPLWRFPNELPIAGEPANIVALVEEYMDWLHQSPVPKLLFWGTPGVLIPPAEAARLAKSLPNCKAVDIGPGLNLLQEDNPDLIGSEIARWLSTLEISG

SEQ ID NO: 49 - protein, 28 aa, Synthetic construct
MAEIGTGFPFDPHYVEVLGERMHYVDVG

SEQ ID NO: 50 - protein, 268 aa, Synthetic construct
RDGTPVLFLHGNPTSSYVWRNIIPHVAPTHRCIAPDLIGMGKSDKPDLGYFFDDHVRFMDAFIEALGLEEVVLVIHDWGSALGFHWAKRNPERVKGIAFMEFIRPIPTWDEWPEFARETFQAFRTTDVGRKLIIDQNVFIEGTLPMGVVRPLTEVEMDHYREPFLNPVDREPLWRFPNELPIAGEPANIVALVEEYMDWLHQSPVPKLLFWGTPGVLIPPAEAARLAKSLPNCKAVDIGPGLNLLQEDNPDLIGSEIARWLSTLEISG

SEQ ID NO: 51 - protein, 29 aa, Synthetic construct
MAEIGTGFPFDPHYVEVLGERMHYVDVGP

SEQ ID NO: 52 - protein, 267 aa, Synthetic construct
DGTPVLFLHGNPTSSYVWRNIIPHVAPTHRCIAPDLIGMGKSDKPDLGYFFDDHVRFMDAFIEALGLEEVVLVIHDWGSALGFHWAKRNPERVKGIAFMEFIRPIPTWDEWPEFARETFQAFRTTDVGRKLIIDQNVFIEGTLPMGVVRPLTEVEMDHYREPFLNPVDREPLWRFPNELPIAGEPANIVALVEEYMDWLHQSPVPKLLFWGTPGVLIPPAEAARLAKSLPNCKAVDIGPGLNLLQEDNPDLIGSEIARWLSTLEISG

SEQ ID NO: 53 - protein, 30 aa, Synthetic construct
MAEIGTGFPFDPHYVEVLGERMHYVDVGPR

SEQ ID NO: 54 - protein, 266 aa, Synthetic construct
GTPVLFLHGNPTSSYVWRNIIPHVAPTHRCIAPDLIGMGKSDKPDLGYFFDDHVRFMDAFIEALGLEEVVLVIHDWGSALGFHWAKRNPERVKGIAFMEFIRPIPTWDEWPEFARETFQAFRTTDVGRKLIIDQNVFIEGTLPMGVVRPLTEVEMDHYREPFLNPVDREPLWRFPNELPIAGEPANIVALVEEYMDWLHQSPVPKLLFWGTPGVLIPPAEAARLAKSLPNCKAVDIGPGLNLLQEDNPDLIGSEIARWLSTLEISG

SEQ ID NO: 55 - protein, 31 aa, Synthetic construct
MAEIGTGFPFDPHYVEVLGERMHYVDVGPRD

SEQ ID NO: 56 - protein, 265 aa, Synthetic construct
TPVLFLHGNPTSSYVWRNIIPHVAPTHRCIAPDLIGMGKSDKPDLGYFFDDHVRFMDAFIEALGLEEVVLVIHDWGSALGFHWAKRNPERVKGIAFMEFIRPIPTWDEWPEFARETFQAFRTTDVGRKLIIDQNVFIEGTLPMGVVRPLTEVEMDHYREPFLNPVDREPLWRFPNELPIAGEPANIVALVEEYMDWLHQSPVPKLLFWGTPGVLIPPAEAARLAKSLPNCKAVDIGPGLNLLQEDNPDLIGSEIARWLSTLEISG

SEQ ID NO: 57 - protein, 32 aa, Synthetic construct
MAEIGTGFPFDPHYVEVLGERMHYVDVGPRDG

SEQ ID NO: 58 - protein, 264 aa, Synthetic construct
PVLFLHGNPTSSYVWRNIIPHVAPTHRCIAPDLIGMGKSDKPDLGYFFDDHVRFMDAFIEALGLEEVVLVIHDWGSALGFHWAKRNPERVKGIAFMEFIRPIPTWDEWPEFARETFQAFRTTDVGRKLIIDQNVFIEGTLPMGVVRPLTEVEMDHYREPFLNPVDREPLWRFPNELPIAGEPANIVALVEEYMDWLHQSPVPKLLFWGTPGVLIPPAEAARLAKSLPNCKAVDIGPGLNLLQEDNPDLIGSEIARWLSTLEISG

SEQ ID NO: 59 - protein, 33 aa, Synthetic construct
MAEIGTGFPFDPHYVEVLGERMHYVDVGPRDGT

SEQ ID NO: 60 - protein, 263 aa, Synthetic construct
VLFLHGNPTSSYVWRNIIPHVAPTHRCIAPDLIGMGKSDKPDLGYFFDDHVRFMDAFIEALGLEEVVLVIHDWGSALGFHWAKRNPERVKGIAFMEFIRPIPTWDEWPEFARETFQAFRTTDVGRKLIIDQNVFIEGTLPMGVVRPLTEVEMDHYREPFLNPVDREPLWRFPNELPIAGEPANIVALVEEYMDWLHQSPVPKLLFWGTPGVLIPPAEAARLAKSLPNCKAVDIGPGLNLLQEDNPDLIGSEIARWLSTLEISG

SEQ ID NO: 61 - protein, 34 aa, Synthetic construct
MAEIGTGFPFDPHYVEVLGERMHYVDVGPRDGTP

SEQ ID NO: 62 - protein, 262 aa, Synthetic construct
LFLHGNPTSSYVWRNIIPHVAPTHRCIAPDLIGMGKSDKPDLGYFFDDHVRFMDAFIEALGLEEVVLVIHDWGSALGFHWAKRNPERVKGIAFMEFIRPIPTWDEWPEFARETFQAFRTTDVGRKLIIDQNVFIEGTLPMGVVRPLTEVEMDHYREPFLNPVDREPLWRFPNELPIAGEPANIVALVEEYMDWLHQSPVPKLLFWGTPGVLIPPAEAARLAKSLPNCKAVDIGPGLNLLQEDNPDLIGSEIARWLSTLEISG

SEQ ID NO: 63 - protein, 35 aa, Synthetic construct
MAEIGTGFPFDPHYVEVLGERMHYVDVGPRDGTPV

SEQ ID NO: 64 - protein, 261 aa, Synthetic construct
FLHGNPTSSYVWRNIIPHVAPTHRCIAPDLIGMGKSDKPDLGYFFDDHVRFMDAFIEALGLEEVVLVIHDWGSALGFHWAKRNPERVKGIAFMEFIRPIPTWDEWPEFARETFQAFRTTDVGRKLIIDQNVFIEGTLPMGVVRPLTEVEMDHYREPFLNPVDREPLWRFPNELPIAGEPANIVALVEEYMDWLHQSPVPKLLFWGTPGVLIPPAEAARLAKSLPNCKAVDIGPGLNLLQEDNPDLIGSEIARWLSTLEISG

SEQ ID NO: 65 - protein, 36 aa, Synthetic construct
MAEIGTGFPFDPHYVEVLGERMHYVDVGPRDGTPVL

SEQ ID NO: 66 - protein, 260 aa, Synthetic construct
LHGNPTSSYVWRNIIPHVAPTHRCIAPDLIGMGKSDKPDLGYFFDDHVRFMDAFIEALGLEEVVLVIHDWGSALGFHWAKRNPERVKGIAFMEFIRPIPTWDEWPEFARETFQAFRTTDVGRKLIIDQNVFIEGTLPMGVVRPLTEVEMDHYREPFLNPVDREPLWRFPNELPIAGEPANIVALVEEYMDWLHQSPVPKLLFWGTPGVLIPPAEAARLAKSLPNCKAVDIGPGLNLLQEDNPDLIGSEIARWLSTLEISG

SEQ ID NO: 67 - protein, 37 aa, Synthetic construct
MAEIGTGFPFDPHYVEVLGERMHYVDVGPRDGTPVLF

SEQ ID NO: 68 - protein, 259 aa, Synthetic construct
HGNPTSSYVWRNIIPHVAPTHRCIAPDLIGMGKSDKPDLGYFFDDHVRFMDAFIEALGLEEVVLVIHDWGSALGFHWAKRNPERVKGIAFMEFIRPIPTWDEWPEFARETFQAFRTTDVGRKLIIDQNVFIEGTLPMGVVRPLTEVEMDHYREPFLNPVDREPLWRFPNELPIAGEPANIVALVEEYMDWLHQSPVPKLLFWGTPGVLIPPAEAARLAKSLPNCKAVDIGPGLNLLQEDNPDLIGSEIARWLSTLEISG

SEQ ID NO: 69 - protein, 38 aa, Synthetic construct
MAEIGTGFPFDPHYVEVLGERMHYVDVGPRDGTPVLFL

SEQ ID NO: 70 - protein, 258 aa, Synthetic construct
GNPTSSYVWRNIIPHVAPTHRCIAPDLIGMGKSDKPDLGYFFDDHVRFMDAFIEALGLEEVVLVIHDWGSALGFHWAKRNPERVKGIAFMEFIRPIPTWDEWPEFARETFQAFRTTDVGRKLIIDQNVFIEGTLPMGVVRPLTEVEMDHYREPFLNPVDREPLWRFPNELPIAGEPANIVALVEEYMDWLHQSPVPKLLFWGTPGVLIPPAEAARLAKSLPNCKAVDIGPGLNLLQEDNPDLIGSEIARWLSTLEISG

SEQ ID NO: 71 - protein, 39 aa, Synthetic construct
MAEIGTGFPFDPHYVEVLGERMHYVDVGPRDGTPVLFLH

SEQ ID NO: 72 - protein, 257 aa, Synthetic construct
NPTSSYVWRNIIPHVAPTHRCIAPDLIGMGKSDKPDLGYFFDDHVRFMDAFIEALGLEEVVLVIHDWGSALGFHWAKRNPERVKGIAFMEFIRPIPTWDEWPEFARETFQAFRTTDVGRKLIIDQNVFIEGTLPMGVVRPLTEVEMDHYREPFLNPVDREPLWRFPNELPIAGEPANIVALVEEYMDWLHQSPVPKLLFWGTPGVLIPPAEAARLAKSLPNCKAVDIGPGLNLLQEDNPDLIGSEIARWLSTLEISG

SEQ ID NO: 73 - protein, 40 aa, Synthetic construct
MAEIGTGFPFDPHYVEVLGERMHYVDVGPRDGTPVLFLHG

SEQ ID NO: 74 - protein, 256 aa, Synthetic construct
PTSSYVWRNIIPHVAPTHRCIAPDLIGMGKSDKPDLGYFFDDHVRFMDAFIEALGLEEVVLVIHDWGSALGFHWAKRNPERVKGIAFMEFIRPIPTWDEWPEFARETFQAFRTTDVGRKLIIDQNVFIEGTLPMGVVRPLTEVEMDHYREPFLNPVDREPLWRFPNELPIAGEPANIVALVEEYMDWLHQSPVPKLLFWGTPGVLIPPAEAARLAKSLPNCKAVDIGPGLNLLQEDNPDLIGSEIARWLSTLEISG

SEQ ID NO: 75 - protein, 41 aa, Synthetic construct
MAEIGTGFPFDPHYVEVLGERMHYVDVGPRDGTPVLFLHGN

SEQ ID NO: 76 - protein, 255 aa, Synthetic construct
TSSYVWRNIIPHVAPTHRCIAPDLIGMGKSDKPDLGYFFDDHVRFMDAFIEALGLEEVVLVIHDWGSALGFHWAKRNPERVKGIAFMEFIRPIPTWDEWPEFARETFQAFRTTDVGRKLIIDQNVFIEGTLPMGVVRPLTEVEMDHYREPFLNPVDREPLWRFPNELPIAGEPANIVALVEEYMDWLHQSPVPKLLFWGTPGVLIPPAEAARLAKSLPNCKAVDIGPGLNLLQEDNPDLIGSEIARWLSTLEISG

SEQ ID NO: 77 - protein, 42 aa, Synthetic construct
MAEIGTGFPFDPHYVEVLGERMHYVDVGPRDGTPVLFLHGNP

SEQ ID NO: 78 - protein, 254 aa, Synthetic construct
SSYVWRNIIPHVAPTHRCIAPDLIGMGKSDKPDLGYFFDDHVRFMDAFIEALGLEEVVLVIHDWGSALGFHWAKRNPERVKGIAFMEFIRPIPTWDEWPEFARETFQAFRTTDVGRKLIIDQNVFIEGTLPMGVVRPLTEVEMDHYREPFLNPVDREPLWRFPNELPIAGEPANIVALVEEYMDWLHQSPVPKLLFWGTPGVLIPPAEAARLAKSLPNCKAVDIGPGLNLLQEDNPDLIGSEIARWLSTLEISG

SEQ ID NO: 79 - protein, 43 aa, Synthetic construct
MAEIGTGFPFDPHYVEVLGERMHYVDVGPRDGTPVLFLHGNPT

SEQ ID NO: 80 - protein, 253 aa, Synthetic construct
SYVWRNIIPHVAPTHRCIAPDLIGMGKSDKPDLGYFFDDHVRFMDAFIEALGLEEVVLVIHDWGSALGFHWAKRNPERVKGIAFMEFIRPIPTWDEWPEFARETFQAFRTTDVGRKLIIDQNVFIEGTLPMGVVRPLTEVEMDHYREPFLNPVDREPLWRFPNELPIAGEPANIVALVEEYMDWLHQSPVPKLLFWGTPGVLIPPAEAARLAKSLPNCKAVDIGPGLNLLQEDNPDLIGSEIARWLSTLEISG

SEQ ID NO: 81 - protein, 44 aa, Synthetic construct
MAEIGTGFPFDPHYVEVLGERMHYVDVGPRDGTPVLFLHGNPTS

SEQ ID NO: 82 - protein, 252 aa, Synthetic construct
YVWRNIIPHVAPTHRCIAPDLIGMGKSDKPDLGYFFDDHVRFMDAFIEALGLEEVVLVIHDWGSALGFHWAKRNPERVKGIAFMEFIRPIPTWDEWPEFARETFQAFRTTDVGRKLIIDQNVFIEGTLPMGVVRPLTEVEMDHYREPFLNPVDREPLWRFPNELPIAGEPANIVALVEEYMDWLHQSPVPKLLFWGTPGVLIPPAEAARLAKSLPNCKAVDIGPGLNLLQEDNPDLIGSEIARWLSTLEISG

SEQ ID NO: 83 - protein, 45 aa, Synthetic construct
MAEIGTGFPFDPHYVEVLGERMHYVDVGPRDGTPVLFLHGNPTSS

SEQ ID NO: 84 - protein, 251 aa, Synthetic construct
VWRNIIPHVAPTHRCIAPDLIGMGKSDKPDLGYFFDDHVRFMDAFIEALGLEEVVLVIHDWGSALGFHWAKRNPERVKGIAFMEFIRPIPTWDEWPEFARETFQAFRTTDVGRKLIIDQNVFIEGTLPMGVVRPLTEVEMDHYREPFLNPVDREPLWRFPNELPIAGEPANIVALVEEYMDWLHQSPVPKLLFWGTPGVLIPPAEAARLAKSLPNCKAVDIGPGLNLLQEDNPDLIGSEIARWLSTLEISG

SEQ ID NO: 85 - protein, 46 aa, Synthetic construct
MAEIGTGFPFDPHYVEVLGERMHYVDVGPRDGTPVLFLHGNPTSSY

SEQ ID NO: 86 - protein, 250 aa, Synthetic construct
WRNIIPHVAPTHRCIAPDLIGMGKSDKPDLGYFFDDHVRFMDAFIEALGLEEVVLVIHDWGSALGFHWAKRNPERVKGIAFMEFIRPIPTWDEWPEFARETFQAFRTTDVGRKLIIDQNVFIEGTLPMGVVRPLTEVEMDHYREPFLNPVDREPLWRFPNELPIAGEPANIVALVEEYMDWLHQSPVPKLLFWGTPGVLIPPAEAARLAKSLPNCKAVDIGPGLNLLQEDNPDLIGSEIARWLSTLEISG

SEQ ID NO: 87 - protein, 47 aa, Synthetic construct
MAEIGTGFPFDPHYVEVLGERMHYVDVGPRDGTPVLFLHGNPTSSYV

SEQ ID NO: 88 - protein, 249 aa, Synthetic construct
RNIIPHVAPTHRCIAPDLIGMGKSDKPDLGYFFDDHVRFMDAFIEALGLEEVVLVIHDWGSALGFHWAKRNPERVKGIAFMEFIRPIPTWDEWPEFARETFQAFRTTDVGRKLIIDQNVFIEGTLPMGVVRPLTEVEMDHYREPFLNPVDREPLWRFPNELPIAGEPANIVALVEEYMDWLHQSPVPKLLFWGTPGVLIPPAEAARLAKSLPNCKAVDIGPGLNLLQEDNPDLIGSEIARWLSTLEISG

SEQ ID NO: 89 - protein, 49 aa, Synthetic construct
DMAEIGTGFPFDPHYVEVLGERMHYVDVGPRDGTPVLFLHGNPTSSYVW

SEQ ID NO: 90 - protein, 248 aa, Synthetic construct
NIIPHVAPTHRCIAPDLIGMGKSDKPDLGYFFDDHVRFMDAFIEALGLEEVVLVIHDWGSALGFHWAKRNPERVKGIAFMEFIRPIPTWDEWPEFARETFQAFRTTDVGRKLIIDQNVFIEGTLPMGVVRPLTEVEMDHYREPFLNPVDREPLWRFPNELPIAGEPANIVALVEEYMDWLHQSPVPKLLFWGTPGVLIPPAEAARLAKSLPNCKAVDIGPGLNLLQEDNPDLIGSEIARWLSTLEISG

SEQ ID NO: 91 - protein, 49 aa, Synthetic construct
MAEIGTGFPFDPHYVEVLGERMHYVDVGPRDGTPVLFLHGNPTSSYVWR

SEQ ID NO: 92 - protein, 247 aa, Synthetic construct
IIPHVAPTHRCIAPDLIGMGKSDKPDLGYFFDDHVRFMDAFIEALGLEEVVLVIHDWGSALGFHWAKRNPERVKGIAFMEFIRPIPTWDEWPEFARETFQAFRTTDVGRKLIIDQNVFIEGTLPMGVVRPLTEVEMDHYREPFLNPVDREPLWRFPNELPIAGEPANIVALVEEYMDWLHQSPVPKLLFWGTPGVLIPPAEAARLAKSLPNCKAVDIGPGLNLLQEDNPDLIGSEIARWLSTLEISG

SEQ ID NO: 93 - protein, 50 aa, Synthetic construct
MAEIGTGFPFDPHYVEVLGERMHYVDVGPRDGTPVLFLHGNPTSSYVWRN

SEQ ID NO: 94 - protein, 246 aa, Synthetic construct
IPHVAPTHRCIAPDLIGMGKSDKPDLGYFFDDHVRFMDAFIEALGLEEVVLVIHDWGSALGFHWAKRNPERVKGIAFMEFIRPIPTWDEWPEFARETFQAFRTTDVGRKLIIDQNVFIEGTLPMGVVRPLTEVEMDHYREPFLNPVDREPLWRFPNELPIAGEPANIVALVEEYMDWLHQSPVPKLLFWGTPGVLIPPAEAARLAKSLPNCKAVDIGPGLNLLQEDNPDLIGSEIARWLSTLEISG

SEQ ID NO: 95 - protein, 51 aa, Synthetic construct
MAEIGTGFPFDPHYVEVLGERMHYVDVGPRDGTPVLFLHGNPTSSYVWRNI

SEQ ID NO: 96 - protein, 245 aa, Synthetic construct
PHVAPTHRCIAPDLIGMGKSDKPDLGYFFDDHVRFMDAFIEALGLEEVVLVIHDWGSALGFHWAKRNPERVKGIAFMEFIRPIPTWDEWPEFARETFQAFRTTDVGRKLIIDQNVFIEGTLPMGVVRPLTEVEMDHYREPFLNPVDREPLWRFPNELPIAGEPANIVALVEEYMDWLHQSPVPKLLFWGTPGVLIPPAEAARLAKSLPNCKAVDIGPGLNLLQEDNPDLIGSEIARWLSTLEISG

SEQ ID NO: 97 - protein, 52 aa, Synthetic construct
MAEIGTGFPFDPHYVEVLGERMHYVDVGPRDGTPVLFLHGNPTSSYVWRNII

SEQ ID NO: 98 - protein, 244 aa, Synthetic construct
HVAPTHRCIAPDLIGMGKSDKPDLGYFFDDHVRFMDAFIEALGLEEVVLVIHDWGSALGFHWAKRNPERVKGIAFMEFIRPIPTWDEWPEFARETFQAFRTTDVGRKLIIDQNVFIEGTLPMGVVRPLTEVEMDHYREPFLNPVDREPLWRFPNELPIAGEPANIVALVEEYMDWLHQSPVPKLLFWGTPGVLIPPAEAARLAKSLPNCKAVDIGPGLNLLQEDNPDLIGSEIARWLSTLEISG

SEQ ID NO: 99 - protein, 53 aa, Synthetic construct
MAEIGTGFPFDPHYVEVLGERMHYVDVGPRDGTPVLFLHGNPTSSYVWRNIIP

SEQ ID NO: 100 - protein, 243 aa, Synthetic construct
VAPTHRCIAPDLIGMGKSDKPDLGYFFDDHVRFMDAFIEALGLEEVVLVIHDWGSALGFHWAKRNPERVKGIAFMEFIRPIPTWDEWPEFARETFQAFRTTDVGRKLIIDQNVFIEGTLPMGVVRPLTEVEMDHYREPFLNPVDREPLWRFPNELPIAGEPANIVALVEEYMDWLHQSPVPKLLFWGTPGVLIPPAEAARLAKSLPNCKAVDIGPGLNLLQEDNPDLIGSEIARWLSTLEISG

SEQ ID NO: 101 - protein, 54 aa, Synthetic construct
MAEIGTGFPFDPHYVEVLGERMHYVDVGPRDGTPVLFLHGNPTSSYVWRNIIPH

SEQ ID NO: 102 - protein, 242 aa, Synthetic construct
APTHRCIAPDLIGMGKSDKPDLGYFFDDHVRFMDAFIEALGLEEVVLVIHDWGSALGFHWAKRNPERVKGIAFMEFIRPIPTWDEWPEFARETFQAFRTTDVGRKLIIDQNVFIEGTLPMGVVRPLTEVEMDHYREPFLNPVDREPLWRFPNELPIAGEPANIVALVEEYMDWLHQSPVPKLLFWGTPGVLIPPAEAARLAKSLPNCKAVDIGPGLNLLQEDNPDLIGSEIARWLSTLEISG

SEQ ID NO: 103 - protein, 55 aa, Synthetic construct
MAEIGTGFPFDPHYVEVLGERMHYVDVGPRDGTPVLFLHGNPTSSYVWRNIIPHV

SEQ ID NO: 104 - protein, 241 aa, Synthetic construct
PTHRCIAPDLIGMGKSDKPDLGYFFDDHVRFMDAFIEALGLEEVVLVIHDWGSALGFHWAKRNPERVKGIAFMEFIRPIPTWDEWPEFARETFQAFRTTDVGRKLIIDQNVFIEGTLPMGVVRPLTEVEMDHYREPFLNPVDREPLWRFPNELPIAGEPANIVALVEEYMDWLHQSPVPKLLFWGTPGVLIPPAEAARLAKSLPNCKAVDIGPGLNLLQEDNPDLIGSEIARWLSTLEISG

SEQ ID NO: 105 - protein, 56 aa, Synthetic construct
MAEIGTGFPFDPHYVEVLGERMHYVDVGPRDGTPVLFLHGNPTSSYVWRNIIPHVA

SEQ ID NO: 106 - protein, 240 aa, Synthetic construct
THRCIAPDLIGMGKSDKPDLGYFFDDHVRFMDAFIEALGLEEVVLVIHDWGSALGFHWAKRNPERVKGIAFMEFIRPIPTWDEWPEFARETFQAFRTTDVGRKLIIDQNVFIEGTLPMGVVRPLTEVEMDHYREPFLNPVDREPLWRFPNELPIAGEPANIVALVEEYMDWLHQSPVPKLLFWGTPGVLIPPAEAARLAKSLPNCKAVDIGPGLNLLQEDNPDLIGSEIARWLSTLEISG

SEQ ID NO: 107 - protein, 57 aa, Synthetic construct
MAEIGTGFPFDPHYVEVLGERMHYVDVGPRDGTPVLFLHGNPTSSYVWRNIIPHVAP

SEQ ID NO: 108 - protein, 239 aa, Synthetic construct
HRCIAPDLIGMGKSDKPDLGYFFDDHVRFMDAFIEALGLEEVVLVIHDWGSALGFHWAKRNPERVKGIAFMEFIRPIPTWDEWPEFARETFQAFRTTDVGRKLIIDQNVFIEGTLPMGVVRPLTEVEMDHYREPFLNPVDREPLWRFPNELPIAGEPANIVALVEEYMDWLHQSPVPKLLFWGTPGVLIPPAEAARLAKSLPNCKAVDIGPGLNLLQEDNPDLIGSEIARWLSTLEISG

SEQ ID NO: 109 - protein, 58 aa, Synthetic construct
MAEIGTGFPFDPHYVEVLGERMHYVDVGPRDGTPVLFLHGNPTSSYVWRNIIPHVAPT

SEQ ID NO: 110 - protein, 238 aa, Synthetic construct
RCIAPDLIGMGKSDKPDLGYFFDDHVRFMDAFIEALGLEEVVLVIHDWGSALGFHWAKRNPERVKGIAFMEFIRPIPTWDEWPEFARETFQAFRTTDVGRKLIIDQNVFIEGTLPMGVVRPLTEVEMDHYREPFLNPVDREPLWRFPNELPIAGEPANIVALVEEYMDWLHQSPVPKLLFWGTPGVLIPPAEAARLAKSLPNCKAVDIGPGLNLLQEDNPDLIGSEIARWLSTLEISG

SEQ ID NO: 111 - protein, 59 aa, Synthetic construct
MAEIGTGFPFDPHYVEVLGERMHYVDVGPRDGTPVLFLHGNPTSSYVWRNIIPHVAPTH

SEQ ID NO: 112 - protein, 237 aa, Synthetic construct
CIAPDLIGMGKSDKPDLGYFFDDHVRFMDAFIEALGLEEVVLVIHDWGSALGFHWAKRNPERVKGIAFMEFIRPIPTWDEWPEFARETFQAFRTTDVGRKLIIDQNVFIEGTLPMGVVRPLTEVEMDHYREPFLNPVDREPLWRFPNELPIAGEPANIVALVEEYMDWLHQSPVPKLLFWGTPGVLIPPAEAARLAKSLPNCKAVDIGPGLNLLQEDNPDLIGSEIARWLSTLEISG

SEQ ID NO: 113 - protein, 60 aa, Synthetic construct
MAEIGTGFPFDPHYVEVLGERMHYVDVGPRDGTPVLFLHGNPTSSYVWRNIIPHVAPTHR

SEQ ID NO: 114 - protein, 236 aa, Synthetic construct
IAPDLIGMGKSDKPDLGYFFDDHVRFMDAFIEALGLEEVVLVIHDWGSALGFHWAKRNPERVKGIAFMEFIRPIPTWDEWPEFARETFQAFRTTDVGRKLIIDQNVFIEGTLPMGVVRPLTEVEMDHYREPFLNPVDREPLWRFPNELPIAGEPANIVALVEEYMDWLHQSPVPKLLFWGTPGVLIPPAEAARLAKSLPNCKAVDIGPGLNLLQEDNPDLIGSEIARWLSTLEISG

SEQ ID NO: 115 - protein, 61 aa, Synthetic construct
MAEIGTGFPFDPHYVEVLGERMHYVDVGPRDGTPVLFLHGNPTSSYVWRNIIPHVAPTHRC

SEQ ID NO: 116 - protein, 235 aa, Synthetic construct
APDLIGMGKSDKPDLGYFFDDHVRFMDAFIEALGLEEVVLVIHDWGSALGFHWAKRNPERVKGIAFMEFIRPIPTWDEWPEFARETFQAFRTTDVGRKLIIDQNVFIEGTLPMGVVRPLTEVEMDHYREPFLNPVDREPLWRFPNELPIAGEPANIVALVEEYMDWLHQSPVPKLLFWGTPGVLIPPAEAARLAKSLPNCKAVDIGPGLNLLQEDNPDLIGSEIARWLSTLEISG

SEQ ID NO: 117 - protein, 63 aa, Synthetic construct
XMAEIGTGFPFDPHYVEVLGERMHYVDVGPRDGTPVLFLHGNPTSSYVWRNIIPHVAPTHRCI

SEQ ID NO: 118 - protein, 234 aa, Synthetic construct
PDLIGMGKSDKPDLGYFFDDHVRFMDAFIEALGLEEVVLVIHDWGSALGFHWAKRNPERVKGIAFMEFIRPIPTWDEWPEFARETFQAFRTTDVGRKLIIDQNVFIEGTLPMGVVRPLTEVEMDHYREPFLNPVDREPLWRFPNELPIAGEPANIVALVEEYMDWLHQSPVPKLLFWGTPGVLIPPAEAARLAKSLPNCKAVDIGPGLNLLQEDNPDLIGSEIARWLSTLEISG

SEQ ID NO: 119 - protein, 63 aa, Synthetic construct
MAEIGTGFPFDPHYVEVLGERMHYVDVGPRDGTPVLFLHGNPTSSYVWRNIIPHVAPTHRCIA

SEQ ID NO: 120 - protein, 233 aa, Synthetic construct
DLIGMGKSDKPDLGYFFDDHVRFMDAFIEALGLEEVVLVIHDWGSALGFHWAKRNPERVKGIAFMEFIRPIPTWDEWPEFARETFQAFRTTDVGRKLIIDQNVFIEGTLPMGVVRPLTEVEMDHYREPFLNPVDREPLWRFPNELPIAGEPANIVALVEEYMDWLHQSPVPKLLFWGTPGVLIPPAEAARLAKSLPNCKAVDIGPGLNLLQEDNPDLIGSEIARWLSTLEISG

SEQ ID NO: 121 - protein, 64 aa, Synthetic construct
MAEIGTGFPFDPHYVEVLGERMHYVDVGPRDGTPVLFLHGNPTSSYVWRNIIPHVAPTHRCIAP

SEQ ID NO: 122 - protein, 232 aa, Synthetic construct
LIGMGKSDKPDLGYFFDDHVRFMDAFIEALGLEEVVLVIHDWGSALGFHWAKRNPERVKGIAFMEFIRPIPTWDEWPEFARETFQAFRTTDVGRKLIIDQNVFIEGTLPMGVVRPLTEVEMDHYREPFLNPVDREPLWRFPNELPIAGEPANIVALVEEYMDWLHQSPVPKLLFWGTPGVLIPPAEAARLAKSLPNCKAVDIGPGLNLLQEDNPDLIGSEIARWLSTLEISG

SEQ ID NO: 123 - protein, 65 aa, Synthetic construct
MAEIGTGFPFDPHYVEVLGERMHYVDVGPRDGTPVLFLHGNPTSSYVWRNIIPHVAPTHRCIAPD

SEQ ID NO: 124 - protein, 231 aa, Synthetic construct
IGMGKSDKPDLGYFFDDHVRFMDAFIEALGLEEVVLVIHDWGSALGFHWAKRNPERVKGIAFMEFIRPIPTWDEWPEFARETFQAFRTTDVGRKLIIDQNVFIEGTLPMGVVRPLTEVEMDHYREPFLNPVDREPLWRFPNELPIAGEPANIVALVEEYMDWLHQSPVPKLLFWGTPGVLIPPAEAARLAKSLPNCKAVDIGPGLNLLQEDNPDLIGSEIARWLSTLEISG

SEQ ID NO: 125 - protein, 66 aa, Synthetic construct
MAEIGTGFPFDPHYVEVLGERMHYVDVGPRDGTPVLFLHGNPTSSYVWRNIIPHVAPTHRCIAPDL

SEQ ID NO: 126 - protein, 230 aa, Synthetic construct
GMGKSDKPDLGYFFDDHVRFMDAFIEALGLEEVVLVIHDWGSALGFHWAKRNPERVKGIAFMEFIRPIPTWDEWPEFARETFQAFRTTDVGRKLIIDQNVFIEGTLPMGVVRPLTEVEMDHYREPFLNPVDREPLWRFPNELPIAGEPANIVALVEEYMDWLHQSPVPKLLFWGTPGVLIPPAEAARLAKSLPNCKAVDIGPGLNLLQEDNPDLIGSEIARWLSTLEISG

SEQ ID NO: 127 - protein, 67 aa, Synthetic construct
MAEIGTGFPFDPHYVEVLGERMHYVDVGPRDGTPVLFLHGNPTSSYVWRNIIPHVAPTHRCIAPDLI

SEQ ID NO: 128 - protein, 229 aa, Synthetic construct
MGKSDKPDLGYFFDDHVRFMDAFIEALGLEEVVLVIHDWGSALGFHWAKRNPERVKGIAFMEFIRPIPTWDEWPEFARETFQAFRTTDVGRKLIIDQNVFIEGTLPMGVVRPLTEVEMDHYREPFLNPVDREPLWRFPNELPIAGEPANIVALVEEYMDWLHQSPVPKLLFWGTPGVLIPPAEAARLAKSLPNCKAVDIGPGLNLLQEDNPDLIGSEIARWLSTLEISG

SEQ ID NO: 129 - protein, 68 aa, Synthetic construct
MAEIGTGFPFDPHYVEVLGERMHYVDVGPRDGTPVLFLHGNPTSSYVWRNIIPHVAPTHRCIAPDLIG

SEQ ID NO: 130 - protein, 228 aa, Synthetic construct
GKSDKPDLGYFFDDHVRFMDAFIEALGLEEVVLVIHDWGSALGFHWAKRNPERVKGIAFMEFIRPIPTWDEWPEFARETFQAFRTTDVGRKLIIDQNVFIEGTLPMGVVRPLTEVEMDHYREPFLNPVDREPLWRFPNELPIAGEPANIVALVEEYMDWLHQSPVPKLLFWGTPGVLIPPAEAARLAKSLPNCKAVDIGPGLNLLQEDNPDLIGSEIARWLSTLEISG

SEQ ID NO: 131 - protein, 69 aa, Synthetic construct
MAEIGTGFPFDPHYVEVLGERMHYVDVGPRDGTPVLFLHGNPTSSYVWRNIIPHVAPTHRCIAPDLIGM

SEQ ID NO: 132 - protein, 227 aa, Synthetic construct
KSDKPDLGYFFDDHVRFMDAFIEALGLEEVVLVIHDWGSALGFHWAKRNPERVKGIAFMEFIRPIPTWDEWPEFARETFQAFRTTDVGRKLIIDQNVFIEGTLPMGVVRPLTEVEMDHYREPFLNPVDREPLWRFPNELPIAGEPANIVALVEEYMDWLHQSPVPKLLFWGTPGVLIPPAEAARLAKSLPNCKAVDIGPGLNLLQEDNPDLIGSEIARWLSTLEISG

SEQ ID NO: 133 - protein, 70 aa, Synthetic construct
MAEIGTGFPFDPHYVEVLGERMHYVDVGPRDGTPVLFLHGNPTSSYVWRNIIPHVAPTHRCIAPDLIGMG

SEQ ID NO: 134 - protein, 226 aa, Synthetic construct
SDKPDLGYFFDDHVRFMDAFIEALGLEEVVLVIHDWGSALGFHWAKRNPERVKGIAFMEFIRPIPTWDEWPEFARETFQAFRTTDVGRKLIIDQNVFIEGTLPMGVVRPLTEVEMDHYREPFLNPVDREPLWRFPNELPIAGEPANIVALVEEYMDWLHQSPVPKLLFWGTPGVLIPPAEAARLAKSLPNCKAVDIGPGLNLLQEDNPDLIGSEIARWLSTLEISG

SEQ ID NO: 135 - protein, 71 aa, Synthetic construct
MAEIGTGFPFDPHYVEVLGERMHYVDVGPRDGTPVLFLHGNPTSSYVWRNIIPHVAPTHRCIAPDLIGMGK

SEQ ID NO: 136 - protein, 225 aa, Synthetic construct
DKPDLGYFFDDHVRFMDAFIEALGLEEVVLVIHDWGSALGFHWAKRNPERVKGIAFMEFIRPIPTWDEWPEFARETFQAFRTTDVGRKLIIDQNVFIEGTLPMGVVRPLTEVEMDHYREPFLNPVDREPLWRFPNELPIAGEPANIVALVEEYMDWLHQSPVPKLLFWGTPGVLIPPAEAARLAKSLPNCKAVDIGPGLNLLQEDNPDLIGSEIARWLSTLEISG

SEQ ID NO: 137 - protein, 72 aa, Synthetic construct
MAEIGTGFPFDPHYVEVLGERMHYVDVGPRDGTPVLFLHGNPTSSYVWRNIIPHVAPTHRCIAPDLIGMGKS

SEQ ID NO: 138 - protein, 224 aa, Synthetic construct
KPDLGYFFDDHVRFMDAFIEALGLEEVVLVIHDWGSALGFHWAKRNPERVKGIAFMEFIRPIPTWDEWPEFARETFQAFRTTDVGRKLIIDQNVFIEGTLPMGVVRPLTEVEMDHYREPFLNPVDREPLWRFPNELPIAGEPANIVALVEEYMDWLHQSPVPKLLFWGTPGVLIPPAEAARLAKSLPNCKAVDIGPGLNLLQEDNPDLIGSEIARWLSTLEISG

SEQ ID NO: 139 - protein, 73 aa, Synthetic construct
MAEIGTGFPFDPHYVEVLGERMHYVDVGPRDGTPVLFLHGNPTSSYVWRNIIPHVAPTHRCIAPDLIGMGKSD

SEQ ID NO: 140 - protein, 223 aa, Synthetic construct
PDLGYFFDDHVRFMDAFIEALGLEEVVLVIHDWGSALGFHWAKRNPERVKGIAFMEFIRPIPTWDEWPEFARETFQAFRTTDVGRKLIIDQNVFIEGTLPMGVVRPLTEVEMDHYREPFLNPVDREPLWRFPNELPIAGEPANIVALVEEYMDWLHQSPVPKLLFWGTPGVLIPPAEAARLAKSLPNCKAVDIGPGLNLLQEDNPDLIGSEIARWLSTLEISG

SEQ ID NO: 141 - protein, 74 aa, Synthetic construct
MAEIGTGFPFDPHYVEVLGERMHYVDVGPRDGTPVLFLHGNPTSSYVWRNIIPHVAPTHRCIAPDLIGMGKSDK

SEQ ID NO: 142 - protein, 222 aa, Synthetic construct
DLGYFFDDHVRFMDAFIEALGLEEVVLVIHDWGSALGFHWAKRNPERVKGIAFMEFIRPIPTWDEWPEFARETFQAFRTTDVGRKLIIDQNVFIEGTLPMGVVRPLTEVEMDHYREPFLNPVDREPLWRFPNELPIAGEPANIVALVEEYMDWLHQSPVPKLLFWGTPGVLIPPAEAARLAKSLPNCKAVDIGPGLNLLQEDNPDLIGSEIARWLSTLEISG

SEQ ID NO: 143 - protein, 75 aa, Synthetic construct
MAEIGTGFPFDPHYVEVLGERMHYVDVGPRDGTPVLFLHGNPTSSYVWRNIIPHVAPTHRCIAPDLIGMGKSDKP

SEQ ID NO: 144 - protein, 221 aa, Synthetic construct
LGYFFDDHVRFMDAFIEALGLEEVVLVIHDWGSALGFHWAKRNPERVKGIAFMEFIRPIPTWDEWPEFARETFQAFRTTDVGRKLIIDQNVFIEGTLPMGVVRPLTEVEMDHYREPFLNPVDREPLWRFPNELPIAGEPANIVALVEEYMDWLHQSPVPKLLFWGTPGVLIPPAEAARLAKSLPNCKAVDIGPGLNLLQEDNPDLIGSEIARWLSTLEISG

SEQ ID NO: 145 - protein, 76 aa, Synthetic construct
MAEIGTGFPFDPHYVEVLGERMHYVDVGPRDGTPVLFLHGNPTSSYVWRNIIPHVAPTHRCIAPDLIGMGKSDKPD

SEQ ID NO: 146 - protein, 220 aa, Synthetic construct
GYFFDDHVRFMDAFIEALGLEEVVLVIHDWGSALGFHWAKRNPERVKGIAFMEFIRPIPTWDEWPEFARETFQAFRTTDVGRKLIIDQNVFIEGTLPMGVVRPLTEVEMDHYREPFLNPVDREPLWRFPNELPIAGEPANIVALVEEYMDWLHQSPVPKLLFWGTPGVLIPPAEAARLAKSLPNCKAVDIGPGLNLLQEDNPDLIGSEIARWLSTLEISG

SEQ ID NO: 147 - protein, 77 aa, Synthetic construct
MAEIGTGFPFDPHYVEVLGERMHYVDVGPRDGTPVLFLHGNPTSSYVWRNIIPHVAPTHRCIAPDLIGMGKSDKPDL

SEQ ID NO: 148 - protein, 219 aa, Synthetic construct
YFFDDHVRFMDAFIEALGLEEVVLVIHDWGSALGFHWAKRNPERVKGIAFMEFIRPIPTWDEWPEFARETFQAFRTTDVGRKLIIDQNVFIEGTLPMGVVRPLTEVEMDHYREPFLNPVDREPLWRFPNELPIAGEPANIVALVEEYMDWLHQSPVPKLLFWGTPGVLIPPAEAARLAKSLPNCKAVDIGPGLNLLQEDNPDLIGSEIARWLSTLEISG

SEQ ID NO: 149 - protein, 78 aa, Synthetic construct
MAEIGTGFPFDPHYVEVLGERMHYVDVGPRDGTPVLFLHGNPTSSYVWRNIIPHVAPTHRCIAPDLIGMGKSDKPDLG

SEQ ID NO: 150 - protein, 218 aa, Synthetic construct
FFDDHVRFMDAFIEALGLEEVVLVIHDWGSALGFHWAKRNPERVKGIAFMEFIRPIPTWDEWPEFARETFQAFRTTDVGRKLIIDQNVFIEGTLPMGVVRPLTEVEMDHYREPFLNPVDREPLWRFPNELPIAGEPANIVALVEEYMDWLHQSPVPKLLFWGTPGVLIPPAEAARLAKSLPNCKAVDIGPGLNLLQEDNPDLIGSEIARWLSTLEISG

SEQ ID NO: 151 - protein, 79 aa, Synthetic construct
MAEIGTGFPFDPHYVEVLGERMHYVDVGPRDGTPVLFLHGNPTSSYVWRNIIPHVAPTHRCIAPDLIGMGKSDKPDLGY

SEQ ID NO: 152 - protein, 217 aa, Synthetic construct
FDDHVRFMDAFIEALGLEEVVLVIHDWGSALGFHWAKRNPERVKGIAFMEFIRPIPTWDEWPEFARETFQAFRTTDVGRKLIIDQNVFIEGTLPMGVVRPLTEVEMDHYREPFLNPVDREPLWRFPNELPIAGEPANIVALVEEYMDWLHQSPVPKLLFWGTPGVLIPPAEAARLAKSLPNCKAVDIGPGLNLLQEDNPDLIGSEIARWLSTLEISG

SEQ ID NO: 153 - protein, 80 aa, Synthetic construct
MAEIGTGFPFDPHYVEVLGERMHYVDVGPRDGTPVLFLHGNPTSSYVWRNIIPHVAPTHRCIAPDLIGMGKSDKPDLGYF

SEQ ID NO: 154 - protein, 216 aa, Synthetic construct
DDHVRFMDAFIEALGLEEVVLVIHDWGSALGFHWAKRNPERVKGIAFMEFIRPIPTWDEWPEFARETFQAFRTTDVGRKLIIDQNVFIEGTLPMGVVRPLTEVEMDHYREPFLNPVDREPLWRFPNELPIAGEPANIVALVEEYMDWLHQSPVPKLLFWGTPGVLIPPAEAARLAKSLPNCKAVDIGPGLNLLQEDNPDLIGSEIARWLSTLEISG

SEQ ID NO: 155 - protein, 81 aa, Synthetic construct
MAEIGTGFPFDPHYVEVLGERMHYVDVGPRDGTPVLFLHGNPTSSYVWRNIIPHVAPTHRCIAPDLIGMGKSDKPDLGYFF

SEQ ID NO: 156 - protein, 215 aa, Synthetic construct
DHVRFMDAFIEALGLEEVVLVIHDWGSALGFHWAKRNPERVKGIAFMEFIRPIPTWDEWPEFARETFQAFRTTDVGRKLIIDQNVFIEGTLPMGVVRPLTEVEMDHYREPFLNPVDREPLWRFPNELPIAGEPANIVALVEEYMDWLHQSPVPKLLFWGTPGVLIPPAEAARLAKSLPNCKAVDIGPGLNLLQEDNPDLIGSEIARWLSTLEISG

SEQ ID NO: 157 - protein, 82 aa, Synthetic construct
MAEIGTGFPFDPHYVEVLGERMHYVDVGPRDGTPVLFLHGNPTSSYVWRNIIPHVAPTHRCIAPDLIGMGKSDKPDLGYFFD

SEQ ID NO: 158 - protein, 214 aa, Synthetic construct
HVRFMDAFIEALGLEEVVLVIHDWGSALGFHWAKRNPERVKGIAFMEFIRPIPTWDEWPEFARETFQAFRTTDVGRKLIIDQNVFIEGTLPMGVVRPLTEVEMDHYREPFLNPVDREPLWRFPNELPIAGEPANIVALVEEYMDWLHQSPVPKLLFWGTPGVLIPPAEAARLAKSLPNCKAVDIGPGLNLLQEDNPDLIGSEIARWLSTLEISG

SEQ ID NO: 159 - protein, 83 aa, Synthetic construct
MAEIGTGFPFDPHYVEVLGERMHYVDVGPRDGTPVLFLHGNPTSSYVWRNIIPHVAPTHRCIAPDLIGMGKSDKPDLGYFFDD

SEQ ID NO: 160 - protein, 213 aa, Synthetic construct
VRFMDAFIEALGLEEVVLVIHDWGSALGFHWAKRNPERVKGIAFMEFIRPIPTWDEWPEFARETFQAFRTTDVGRKLIIDQNVFIEGTLPMGVVRPLTEVEMDHYREPFLNPVDREPLWRFPNELPIAGEPANIVALVEEYMDWLHQSPVPKLLFWGTPGVLIPPAEAARLAKSLPNCKAVDIGPGLNLLQEDNPDLIGSEIARWLSTLEISG

SEQ ID NO: 161 - protein, 84 aa, Synthetic construct
MAEIGTGFPFDPHYVEVLGERMHYVDVGPRDGTPVLFLHGNPTSSYVWRNIIPHVAPTHRCIAPDLIGMGKSDKPDLGYFFDDH

SEQ ID NO: 162 - protein, 212 aa, Synthetic construct
RFMDAFIEALGLEEVVLVIHDWGSALGFHWAKRNPERVKGIAFMEFIRPIPTWDEWPEFARETFQAFRTTDVGRKLIIDQNVFIEGTLPMGVVRPLTEVEMDHYREPFLNPVDREPLWRFPNELPIAGEPANIVALVEEYMDWLHQSPVPKLLFWGTPGVLIPPAEAARLAKSLPNCKAVDIGPGLNLLQEDNPDLIGSEIARWLSTLEISG

SEQ ID NO: 163 - protein, 85 aa, Synthetic construct
MAEIGTGFPFDPHYVEVLGERMHYVDVGPRDGTPVLFLHGNPTSSYVWRNIIPHVAPTHRCIAPDLIGMGKSDKPDLGYFFDDHV

SEQ ID NO: 164 - protein, 211 aa, Synthetic construct
FMDAFIEALGLEEVVLVIHDWGSALGFHWAKRNPERVKGIAFMEFIRPIPTWDEWPEFARETFQAFRTTDVGRKLIIDQNVFIEGTLPMGVVRPLTEVEMDHYREPFLNPVDREPLWRFPNELPIAGEPANIVALVEEYMDWLHQSPVPKLLFWGTPGVLIPPAEAARLAKSLPNCKAVDIGPGLNLLQEDNPDLIGSEIARWLSTLEISG

SEQ ID NO: 165 - protein, 86 aa, Synthetic construct
MAEIGTGFPFDPHYVEVLGERMHYVDVGPRDGTPVLFLHGNPTSSYVWRNIIPHVAPTHRCIAPDLIGMGKSDKPDLGYFFDDHVR

SEQ ID NO: 166 - protein, 210 aa, Synthetic construct
MDAFIEALGLEEVVLVIHDWGSALGFHWAKRNPERVKGIAFMEFIRPIPTWDEWPEFARETFQAFRTTDVGRKLIIDQNVFIEGTLPMGVVRPLTEVEMDHYREPFLNPVDREPLWRFPNELPIAGEPANIVALVEEYMDWLHQSPVPKLLFWGTPGVLIPPAEAARLAKSLPNCKAVDIGPGLNLLQEDNPDLIGSEIARWLSTLEISG

SEQ ID NO: 167 - protein, 87 aa, Synthetic construct
MAEIGTGFPFDPHYVEVLGERMHYVDVGPRDGTPVLFLHGNPTSSYVWRNIIPHVAPTHRCIAPDLIGMGKSDKPDLGYFFDDHVRF

SEQ ID NO: 168 - protein, 209 aa, Synthetic construct
DAFIEALGLEEVVLVIHDWGSALGFHWAKRNPERVKGIAFMEFIRPIPTWDEWPEFARETFQAFRTTDVGRKLIIDQNVFIEGTLPMGVVRPLTEVEMDHYREPFLNPVDREPLWRFPNELPIAGEPANIVALVEEYMDWLHQSPVPKLLFWGTPGVLIPPAEAARLAKSLPNCKAVDIGPGLNLLQEDNPDLIGSEIARWLSTLEISG

SEQ ID NO: 169 - protein, 88 aa, Synthetic construct
MAEIGTGFPFDPHYVEVLGERMHYVDVGPRDGTPVLFLHGNPTSSYVWRNIIPHVAPTHRCIAPDLIGMGKSDKPDLGYFFDDHVRFM

SEQ ID NO: 170 - protein, 208 aa, Synthetic construct
AFIEALGLEEVVLVIHDWGSALGFHWAKRNPERVKGIAFMEFIRPIPTWDEWPEFARETFQAFRTTDVGRKLIIDQNVFIEGTLPMGVVRPLTEVEMDHYREPFLNPVDREPLWRFPNELPIAGEPANIVALVEEYMDWLHQSPVPKLLFWGTPGVLIPPAEAARLAKSLPNCKAVDIGPGLNLLQEDNPDLIGSEIARWLSTLEISG

SEQ ID NO: 171 - protein, 89 aa, Synthetic construct
MAEIGTGFPFDPHYVEVLGERMHYVDVGPRDGTPVLFLHGNPTSSYVWRNIIPHVAPTHRCIAPDLIGMGKSDKPDLGYFFDDHVRFMD

SEQ ID NO: 172 - protein, 207 aa, Synthetic construct
FIEALGLEEVVLVIHDWGSALGFHWAKRNPERVKGIAFMEFIRPIPTWDEWPEFARETFQAFRTTDVGRKLIIDQNVFIEGTLPMGVVRPLTEVEMDHYREPFLNPVDREPLWRFPNELPIAGEPANIVALVEEYMDWLHQSPVPKLLFWGTPGVLIPPAEAARLAKSLPNCKAVDIGPGLNLLQEDNPDLIGSEIARWLSTLEISG

SEQ ID NO: 173 - protein, 90 aa, Synthetic construct
MAEIGTGFPFDPHYVEVLGERMHYVDVGPRDGTPVLFLHGNPTSSYVWRNIIPHVAPTHRCIAPDLIGMGKSDKPDLGYFFDDHVRFMDA

SEQ ID NO: 174 - protein, 206 aa, Synthetic construct
IEALGLEEVVLVIHDWGSALGFHWAKRNPERVKGIAFMEFIRPIPTWDEWPEFARETFQAFRTTDVGRKLIIDQNVFIEGTLPMGVVRPLTEVEMDHYREPFLNPVDREPLWRFPNELPIAGEPANIVALVEEYMDWLHQSPVPKLLFWGTPGVLIPPAEAARLAKSLPNCKAVDIGPGLNLLQEDNPDLIGSEIARWLSTLEISG

SEQ ID NO: 175 - protein, 91 aa, Synthetic construct
MAEIGTGFPFDPHYVEVLGERMHYVDVGPRDGTPVLFLHGNPTSSYVWRNIIPHVAPTHRCIAPDLIGMGKSDKPDLGYFFDDHVRFMDAF

SEQ ID NO: 176 - protein, 205 aa, Synthetic construct
EALGLEEVVLVIHDWGSALGFHWAKRNPERVKGIAFMEFIRPIPTWDEWPEFARETFQAFRTTDVGRKLIIDQNVFIEGTLPMGVVRPLTEVEMDHYREPFLNPVDREPLWRFPNELPIAGEPANIVALVEEYMDWLHQSPVPKLLFWGTPGVLIPPAEAARLAKSLPNCKAVDIGPGLNLLQEDNPDLIGSEIARWLSTLEISG

SEQ ID NO: 177 - protein, 92 aa, Synthetic construct
MAEIGTGFPFDPHYVEVLGERMHYVDVGPRDGTPVLFLHGNPTSSYVWRNIIPHVAPTHRCIAPDLIGMGKSDKPDLGYFFDDHVRFMDAFI

SEQ ID NO: 178 - protein, 204 aa, Synthetic construct
ALGLEEVVLVIHDWGSALGFHWAKRNPERVKGIAFMEFIRPIPTWDEWPEFARETFQAFRTTDVGRKLIIDQNVFIEGTLPMGVVRPLTEVEMDHYREPFLNPVDREPLWRFPNELPIAGEPANIVALVEEYMDWLHQSPVPKLLFWGTPGVLIPPAEAARLAKSLPNCKAVDIGPGLNLLQEDNPDLIGSEIARWLSTLEISG

SEQ ID NO: 179 - protein, 93 aa, Synthetic construct
MAEIGTGFPFDPHYVEVLGERMHYVDVGPRDGTPVLFLHGNPTSSYVWRNIIPHVAPTHRCIAPDLIGMGKSDKPDLGYFFDDHVRFMDAFIE

SEQ ID NO: 180 - protein, 203 aa, Synthetic construct
LGLEEVVLVIHDWGSALGFHWAKRNPERVKGIAFMEFIRPIPTWDEWPEFARETFQAFRTTDVGRKLIIDQNVFIEGTLPMGVVRPLTEVEMDHYREPFLNPVDREPLWRFPNELPIAGEPANIVALVEEYMDWLHQSPVPKLLFWGTPGVLIPPAEAARLAKSLPNCKAVDIGPGLNLLQEDNPDLIGSEIARWLSTLEISG

SEQ ID NO: 181 - protein, 94 aa, Synthetic construct
MAEIGTGFPFDPHYVEVLGERMHYVDVGPRDGTPVLFLHGNPTSSYVWRNIIPHVAPTHRCIAPDLIGMGKSDKPDLGYFFDDHVRFMDAFIEA

SEQ ID NO: 182 - protein, 202 aa, Synthetic construct
GLEEVVLVIHDWGSALGFHWAKRNPERVKGIAFMEFIRPIPTWDEWPEFARETFQAFRTTDVGRKLIIDQNVFIEGTLPMGVVRPLTEVEMDHYREPFLNPVDREPLWRFPNELPIAGEPANIVALVEEYMDWLHQSPVPKLLFWGTPGVLIPPAEAARLAKSLPNCKAVDIGPGLNLLQEDNPDLIGSEIARWLSTLEISG

SEQ ID NO: 183 - protein, 95 aa, Synthetic construct
MAEIGTGFPFDPHYVEVLGERMHYVDVGPRDGTPVLFLHGNPTSSYVWRNIIPHVAPTHRCIAPDLIGMGKSDKPDLGYFFDDHVRFMDAFIEAL

SEQ ID NO: 184 - protein, 201 aa, Synthetic construct
LEEVVLVIHDWGSALGFHWAKRNPERVKGIAFMEFIRPIPTWDEWPEFARETFQAFRTTDVGRKLIIDQNVFIEGTLPMGVVRPLTEVEMDHYREPFLNPVDREPLWRFPNELPIAGEPANIVALVEEYMDWLHQSPVPKLLFWGTPGVLIPPAEAARLAKSLPNCKAVDIGPGLNLLQEDNPDLIGSEIARWLSTLEISG

SEQ ID NO: 185 - protein, 96 aa, Synthetic construct
MAEIGTGFPFDPHYVEVLGERMHYVDVGPRDGTPVLFLHGNPTSSYVWRNIIPHVAPTHRCIAPDLIGMGKSDKPDLGYFFDDHVRFMDAFIEALG

SEQ ID NO: 186 - protein, 200 aa, Synthetic construct
EEVVLVIHDWGSALGFHWAKRNPERVKGIAFMEFIRPIPTWDEWPEFARETFQAFRTTDVGRKLIIDQNVFIEGTLPMGVVRPLTEVEMDHYREPFLNPVDREPLWRFPNELPIAGEPANIVALVEEYMDWLHQSPVPKLLFWGTPGVLIPPAEAARLAKSLPNCKAVDIGPGLNLLQEDNPDLIGSEIARWLSTLEISG

SEQ ID NO: 187 - protein, 97 aa, Synthetic construct
MAEIGTGFPFDPHYVEVLGERMHYVDVGPRDGTPVLFLHGNPTSSYVWRNIIPHVAPTHRCIAPDLIGMGKSDKPDLGYFFDDHVRFMDAFIEALGL

SEQ ID NO: 188 - protein, 199 aa, Synthetic construct
EVVLVIHDWGSALGFHWAKRNPERVKGIAFMEFIRPIPTWDEWPEFARETFQAFRTTDVGRKLIIDQNVFIEGTLPMGVVRPLTEVEMDHYREPFLNPVDREPLWRFPNELPIAGEPANIVALVEEYMDWLHQSPVPKLLFWGTPGVLIPPAEAARLAKSLPNCKAVDIGPGLNLLQEDNPDLIGSEIARWLSTLEISG

SEQ ID NO: 189 - protein, 98 aa, Synthetic construct
MAEIGTGFPFDPHYVEVLGERMHYVDVGPRDGTPVLFLHGNPTSSYVWRNIIPHVAPTHRCIAPDLIGMGKSDKPDLGYFFDDHVRFMDAFIEALGLE

SEQ ID NO: 190 - protein, 198 aa, Synthetic construct
VVLVIHDWGSALGFHWAKRNPERVKGIAFMEFIRPIPTWDEWPEFARETFQAFRTTDVGRKLIIDQNVFIEGTLPMGVVRPLTEVEMDHYREPFLNPVDREPLWRFPNELPIAGEPANIVALVEEYMDWLHQSPVPKLLFWGTPGVLIPPAEAARLAKSLPNCKAVDIGPGLNLLQEDNPDLIGSEIARWLSTLEISG

SEQ ID NO: 191 - protein, 99 aa, Synthetic construct
MAEIGTGFPFDPHYVEVLGERMHYVDVGPRDGTPVLFLHGNPTSSYVWRNIIPHVAPTHRCIAPDLIGMGKSDKPDLGYFFDDHVRFMDAFIEALGLEE

SEQ ID NO: 192 - protein, 197 aa, Synthetic construct
VLVIHDWGSALGFHWAKRNPERVKGIAFMEFIRPIPTWDEWPEFARETFQAFRTTDVGRKLIIDQNVFIEGTLPMGVVRPLTEVEMDHYREPFLNPVDREPLWRFPNELPIAGEPANIVALVEEYMDWLHQSPVPKLLFWGTPGVLIPPAEAARLAKSLPNCKAVDIGPGLNLLQEDNPDLIGSEIARWLSTLEISG

SEQ ID NO: 193 - protein, 100 aa, Synthetic construct
MAEIGTGFPFDPHYVEVLGERMHYVDVGPRDGTPVLFLHGNPTSSYVWRNIIPHVAPTHRCIAPDLIGMGKSDKPDLGYFFDDHVRFMDAFIEALGLEEV

SEQ ID NO: 194 - protein, 196 aa, Synthetic construct
LVIHDWGSALGFHWAKRNPERVKGIAFMEFIRPIPTWDEWPEFARETFQAFRTTDVGRKLIIDQNVFIEGTLPMGVVRPLTEVEMDHYREPFLNPVDREPLWRFPNELPIAGEPANIVALVEEYMDWLHQSPVPKLLFWGTPGVLIPPAEAARLAKSLPNCKAVDIGPGLNLLQEDNPDLIGSEIARWLSTLEISG

SEQ ID NO: 195 - protein, 101 aa, Synthetic construct
MAEIGTGFPFDPHYVEVLGERMHYVDVGPRDGTPVLFLHGNPTSSYVWRNIIPHVAPTHRCIAPDLIGMGKSDKPDLGYFFDDHVRFMDAFIEALGLEEVV

SEQ ID NO: 196 - protein, 195 aa, Synthetic construct
VIHDWGSALGFHWAKRNPERVKGIAFMEFIRPIPTWDEWPEFARETFQAFRTTDVGRKLIIDQNVFIEGTLPMGVVRPLTEVEMDHYREPFLNPVDREPLWRFPNELPIAGEPANIVALVEEYMDWLHQSPVPKLLFWGTPGVLIPPAEAARLAKSLPNCKAVDIGPGLNLLQEDNPDLIGSEIARWLSTLEISG

SEQ ID NO: 197 - protein, 102 aa, Synthetic construct
MAEIGTGFPFDPHYVEVLGERMHYVDVGPRDGTPVLFLHGNPTSSYVWRNIIPHVAPTHRCIAPDLIGMGKSDKPDLGYFFDDHVRFMDAFIEALGLEEVVL

SEQ ID NO: 198 - protein, 194 aa, Synthetic construct
IHDWGSALGFHWAKRNPERVKGIAFMEFIRPIPTWDEWPEFARETFQAFRTTDVGRKLIIDQNVFIEGTLPMGVVRPLTEVEMDHYREPFLNPVDREPLWRFPNELPIAGEPANIVALVEEYMDWLHQSPVPKLLFWGTPGVLIPPAEAARLAKSLPNCKAVDIGPGLNLLQEDNPDLIGSEIARWLSTLEISG

SEQ ID NO: 199 - protein, 103 aa, Synthetic construct
MAEIGTGFPFDPHYVEVLGERMHYVDVGPRDGTPVLFLHGNPTSSYVWRNIIPHVAPTHRCIAPDLIGMGKSDKPDLGYFFDDHVRFMDAFIEALGLEEVVLV

SEQ ID NO: 200 - protein, 193 aa, Synthetic construct
HDWGSALGFHWAKRNPERVKGIAFMEFIRPIPTWDEWPEFARETFQAFRTTDVGRKLIIDQNVFIEGTLPMGVVRPLTEVEMDHYREPFLNPVDREPLWRFPNELPIAGEPANIVALVEEYMDWLHQSPVPKLLFWGTPGVLIPPAEAARLAKSLPNCKAVDIGPGLNLLQEDNPDLIGSEIARWLSTLEISG

SEQ ID NO: 201 - protein, 104 aa, Synthetic construct
MAEIGTGFPFDPHYVEVLGERMHYVDVGPRDGTPVLFLHGNPTSSYVWRNIIPHVAPTHRCIAPDLIGMGKSDKPDLGYFFDDHVRFMDAFIEALGLEEVVLVI

SEQ ID NO: 202 - protein, 192 aa, Synthetic construct
DWGSALGFHWAKRNPERVKGIAFMEFIRPIPTWDEWPEFARETFQAFRTTDVGRKLIIDQNVFIEGTLPMGVVRPLTEVEMDHYREPFLNPVDREPLWRFPNELPIAGEPANIVALVEEYMDWLHQSPVPKLLFWGTPGVLIPPAEAARLAKSLPNCKAVDIGPGLNLLQEDNPDLIGSEIARWLSTLEISG

SEQ ID NO: 203 - protein, 105 aa, Synthetic construct
MAEIGTGFPFDPHYVEVLGERMHYVDVGPRDGTPVLFLHGNPTSSYVWRNIIPHVAPTHRCIAPDLIGMGKSDKPDLGYFFDDHVRFMDAFIEALGLEEVVLVIH

SEQ ID NO: 204 - protein, 191 aa, Synthetic construct
WGSALGFHWAKRNPERVKGIAFMEFIRPIPTWDEWPEFARETFQAFRTTDVGRKLIIDQNVFIEGTLPMGVVRPLTEVEMDHYREPFLNPVDREPLWRFPNELPIAGEPANIVALVEEYMDWLHQSPVPKLLFWGTPGVLIPPAEAARLAKSLPNCKAVDIGPGLNLLQEDNPDLIGSEIARWLSTLEISG

SEQ ID NO: 205 - protein, 106 aa, Synthetic construct
MAEIGTGFPFDPHYVEVLGERMHYVDVGPRDGTPVLFLHGNPTSSYVWRNIIPHVAPTHRCIAPDLIGMGKSDKPDLGYFFDDHVRFMDAFIEALGLEEVVLVIHD

SEQ ID NO: 206 - protein, 190 aa, Synthetic construct
GSALGFHWAKRNPERVKGIAFMEFIRPIPTWDEWPEFARETFQAFRTTDVGRKLIIDQNVFIEGTLPMGVVRPLTEVEMDHYREPFLNPVDREPLWRFPNELPIAGEPANIVALVEEYMDWLHQSPVPKLLFWGTPGVLIPPAEAARLAKSLPNCKAVDIGPGLNLLQEDNPDLIGSEIARWLSTLEISG

SEQ ID NO: 207 - protein, 107 aa, Synthetic construct
MAEIGTGFPFDPHYVEVLGERMHYVDVGPRDGTPVLFLHGNPTSSYVWRNIIPHVAPTHRCIAPDLIGMGKSDKPDLGYFFDDHVRFMDAFIEALGLEEVVLVIHDW

SEQ ID NO: 208 - protein, 189 aa, Synthetic construct
SALGFHWAKRNPERVKGIAFMEFIRPIPTWDEWPEFARETFQAFRTTDVGRKLIIDQNVFIEGTLPMGVVRPLTEVEMDHYREPFLNPVDREPLWRFPNELPIAGEPANIVALVEEYMDWLHQSPVPKLLFWGTPGVLIPPAEAARLAKSLPNCKAVDIGPGLNLLQEDNPDLIGSEIARWLSTLEISG

SEQ ID NO: 209 - protein, 108 aa, Synthetic construct
MAEIGTGFPFDPHYVEVLGERMHYVDVGPRDGTPVLFLHGNPTSSYVWRNIIPHVAPTHRCIAPDLIGMGKSDKPDLGYFFDDHVRFMDAFIEALGLEEVVLVIHDWG

SEQ ID NO: 210 - protein, 188 aa, Synthetic construct
ALGFHWAKRNPERVKGIAFMEFIRPIPTWDEWPEFARETFQAFRTTDVGRKLIIDQNVFIEGTLPMGVVRPLTEVEMDHYREPFLNPVDREPLWRFPNELPIAGEPANIVALVEEYMDWLHQSPVPKLLFWGTPGVLIPPAEAARLAKSLPNCKAVDIGPGLNLLQEDNPDLIGSEIARWLSTLEISG

SEQ ID NO: 211 - protein, 109 aa, Synthetic construct
MAEIGTGFPFDPHYVEVLGERMHYVDVGPRDGTPVLFLHGNPTSSYVWRNIIPHVAPTHRCIAPDLIGMGKSDKPDLGYFFDDHVRFMDAFIEALGLEEVVLVIHDWGS

SEQ ID NO: 212 - protein, 187 aa, Synthetic construct
LGFHWAKRNPERVKGIAFMEFIRPIPTWDEWPEFARETFQAFRTTDVGRKLIIDQNVFIEGTLPMGVVRPLTEVEMDHYREPFLNPVDREPLWRFPNELPIAGEPANIVALVEEYMDWLHQSPVPKLLFWGTPGVLIPPAEAARLAKSLPNCKAVDIGPGLNLLQEDNPDLIGSEIARWLSTLEISG

SEQ ID NO: 213 - protein, 110 aa, Synthetic construct
MAEIGTGFPFDPHYVEVLGERMHYVDVGPRDGTPVLFLHGNPTSSYVWRNIIPHVAPTHRCIAPDLIGMGKSDKPDLGYFFDDHVRFMDAFIEALGLEEVVLVIHDWGSA

SEQ ID NO: 214 - protein, 186 aa, Synthetic construct
GFHWAKRNPERVKGIAFMEFIRPIPTWDEWPEFARETFQAFRTTDVGRKLIIDQNVFIEGTLPMGVVRPLTEVEMDHYREPFLNPVDREPLWRFPNELPIAGEPANIVALVEEYMDWLHQSPVPKLLFWGTPGVLIPPAEAARLAKSLPNCKAVDIGPGLNLLQEDNPDLIGSEIARWLSTLEISG

SEQ ID NO: 215 - protein, 111 aa, Synthetic construct
MAEIGTGFPFDPHYVEVLGERMHYVDVGPRDGTPVLFLHGNPTSSYVWRNIIPHVAPTHRCIAPDLIGMGKSDKPDLGYFFDDHVRFMDAFIEALGLEEVVLVIHDWGSAL

SEQ ID NO: 216 - protein, 185 aa, Synthetic construct
FHWAKRNPERVKGIAFMEFIRPIPTWDEWPEFARETFQAFRTTDVGRKLIIDQNVFIEGTLPMGVVRPLTEVEMDHYREPFLNPVDREPLWRFPNELPIAGEPANIVALVEEYMDWLHQSPVPKLLFWGTPGVLIPPAEAARLAKSLPNCKAVDIGPGLNLLQEDNPDLIGSEIARWLSTLEISG

SEQ ID NO: 217 - protein, 112 aa, Synthetic construct
MAEIGTGFPFDPHYVEVLGERMHYVDVGPRDGTPVLFLHGNPTSSYVWRNIIPHVAPTHRCIAPDLIGMGKSDKPDLGYFFDDHVRFMDAFIEALGLEEVVLVIHDWGSALG

SEQ ID NO: 218 - protein, 184 aa, Synthetic construct
HWAKRNPERVKGIAFMEFIRPIPTWDEWPEFARETFQAFRTTDVGRKLIIDQNVFIEGTLPMGVVRPLTEVEMDHYREPFLNPVDREPLWRFPNELPIAGEPANIVALVEEYMDWLHQSPVPKLLFWGTPGVLIPPAEAARLAKSLPNCKAVDIGPGLNLLQEDNPDLIGSEIARWLSTLEISG

SEQ ID NO: 219 - protein, 113 aa, Synthetic construct
MAEIGTGFPFDPHYVEVLGERMHYVDVGPRDGTPVLFLHGNPTSSYVWRNIIPHVAPTHRCIAPDLIGMGKSDKPDLGYFFDDHVRFMDAFIEALGLEEVVLVIHDWGSALGF

SEQ ID NO: 220 - protein, 183 aa, Synthetic construct
WAKRNPERVKGIAFMEFIRPIPTWDEWPEFARETFQAFRTTDVGRKLIIDQNVFIEGTLPMGVVRPLTEVEMDHYREPFLNPVDREPLWRFPNELPIAGEPANIVALVEEYMDWLHQSPVPKLLFWGTPGVLIPPAEAARLAKSLPNCKAVDIGPGLNLLQEDNPDLIGSEIARWLSTLEISG

SEQ ID NO: 221 - protein, 114 aa, Synthetic construct
MAEIGTGFPFDPHYVEVLGERMHYVDVGPRDGTPVLFLHGNPTSSYVWRNIIPHVAPTHRCIAPDLIGMGKSDKPDLGYFFDDHVRFMDAFIEALGLEEVVLVIHDWGSALGFH

SEQ ID NO: 222 - protein, 182 aa, Synthetic construct
AKRNPERVKGIAFMEFIRPIPTWDEWPEFARETFQAFRTTDVGRKLIIDQNVFIEGTLPMGVVRPLTEVEMDHYREPFLNPVDREPLWRFPNELPIAGEPANIVALVEEYMDWLHQSPVPKLLFWGTPGVLIPPAEAARLAKSLPNCKAVDIGPGLNLLQEDNPDLIGSEIARWLSTLEISG

SEQ ID NO: 223 - protein, 115 aa, Synthetic construct
MAEIGTGFPFDPHYVEVLGERMHYVDVGPRDGTPVLFLHGNPTSSYVWRNIIPHVAPTHRCIAPDLIGMGKSDKPDLGYFFDDHVRFMDAFIEALGLEEVVLVIHDWGSALGFHW

SEQ ID NO: 224 - protein, 181 aa, Synthetic construct
KRNPERVKGIAFMEFIRPIPTWDEWPEFARETFQAFRTTDVGRKLIIDQNVFIEGTLPMGVVRPLTEVEMDHYREPFLNPVDREPLWRFPNELPIAGEPANIVALVEEYMDWLHQSPVPKLLFWGTPGVLIPPAEAARLAKSLPNCKAVDIGPGLNLLQEDNPDLIGSEIARWLSTLEISG

SEQ ID NO: 225 - protein, 116 aa, Synthetic construct
MAEIGTGFPFDPHYVEVLGERMHYVDVGPRDGTPVLFLHGNPTSSYVWRNIIPHVAPTHRCIAPDLIGMGKSDKPDLGYFFDDHVRFMDAFIEALGLEEVVLVIHDWGSALGFHWA

SEQ ID NO: 226 - protein, 180 aa, Synthetic construct
RNPERVKGIAFMEFIRPIPTWDEWPEFARETFQAFRTTDVGRKLIIDQNVFIEGTLPMGVVRPLTEVEMDHYREPFLNPVDREPLWRFPNELPIAGEPANIVALVEEYMDWLHQSPVPKLLFWGTPGVLIPPAEAARLAKSLPNCKAVDIGPGLNLLQEDNPDLIGSEIARWLSTLEISG

SEQ ID NO: 227 - protein, 117 aa, Synthetic construct
MAEIGTGFPFDPHYVEVLGERMHYVDVGPRDGTPVLFLHGNPTSSYVWRNIIPHVAPTHRCIAPDLIGMGKSDKPDLGYFFDDHVRFMDAFIEALGLEEVVLVIHDWGSALGFHWAK

SEQ ID NO: 228 - protein, 179 aa, Synthetic construct
NPERVKGIAFMEFIRPIPTWDEWPEFARETFQAFRTTDVGRKLIIDQNVFIEGTLPMGVVRPLTEVEMDHYREPFLNPVDREPLWRFPNELPIAGEPANIVALVEEYMDWLHQSPVPKLLFWGTPGVLIPPAEAARLAKSLPNCKAVDIGPGLNLLQEDNPDLIGSEIARWLSTLEISG

SEQ ID NO: 229 - protein, 118 aa, Synthetic construct
MAEIGTGFPFDPHYVEVLGERMHYVDVGPRDGTPVLFLHGNPTSSYVWRNIIPHVAPTHRCIAPDLIGMGKSDKPDLGYFFDDHVRFMDAFIEALGLEEVVLVIHDWGSALGFHWAKR

SEQ ID NO: 230 - protein, 178 aa, Synthetic construct
PERVKGIAFMEFIRPIPTWDEWPEFARETFQAFRTTDVGRKLIIDQNVFIEGTLPMGVVRPLTEVEMDHYREPFLNPVDREPLWRFPNELPIAGEPANIVALVEEYMDWLHQSPVPKLLFWGTPGVLIPPAEAARLAKSLPNCKAVDIGPGLNLLQEDNPDLIGSEIARWLSTLEISG

SEQ ID NO: 231 - protein, 119 aa, Synthetic construct
MAEIGTGFPFDPHYVEVLGERMHYVDVGPRDGTPVLFLHGNPTSSYVWRNIIPHVAPTHRCIAPDLIGMGKSDKPDLGYFFDDHVRFMDAFIEALGLEEVVLVIHDWGSALGFHWAKRN

SEQ ID NO: 232 - protein, 177 aa, Synthetic construct
ERVKGIAFMEFIRPIPTWDEWPEFARETFQAFRTTDVGRKLIIDQNVFIEGTLPMGVVRPLTEVEMDHYREPFLNPVDREPLWRFPNELPIAGEPANIVALVEEYMDWLHQSPVPKLLFWGTPGVLIPPAEAARLAKSLPNCKAVDIGPGLNLLQEDNPDLIGSEIARWLSTLEISG

SEQ ID NO: 233 - protein, 120 aa, Synthetic construct
MAEIGTGFPFDPHYVEVLGERMHYVDVGPRDGTPVLFLHGNPTSSYVWRNIIPHVAPTHRCIAPDLIGMGKSDKPDLGYFFDDHVRFMDAFIEALGLEEVVLVIHDWGSALGFHWAKRNP

SEQ ID NO: 234 - protein, 176 aa, Synthetic construct
RVKGIAFMEFIRPIPTWDEWPEFARETFQAFRTTDVGRKLIIDQNVFIEGTLPMGVVRPLTEVEMDHYREPFLNPVDREPLWRFPNELPIAGEPANIVALVEEYMDWLHQSPVPKLLFWGTPGVLIPPAEAARLAKSLPNCKAVDIGPGLNLLQEDNPDLIGSEIARWLSTLEISG

SEQ ID NO: 235 - protein, 121 aa, Synthetic construct
MAEIGTGFPFDPHYVEVLGERMHYVDVGPRDGTPVLFLHGNPTSSYVWRNIIPHVAPTHRCIAPDLIGMGKSDKPDLGYFFDDHVRFMDAFIEALGLEEVVLVIHDWGSALGFHWAKRNPE

SEQ ID NO: 236 - protein, 175 aa, Synthetic construct
VKGIAFMEFIRPIPTWDEWPEFARETFQAFRTTDVGRKLIIDQNVFIEGTLPMGVVRPLTEVEMDHYREPFLNPVDREPLWRFPNELPIAGEPANIVALVEEYMDWLHQSPVPKLLFWGTPGVLIPPAEAARLAKSLPNCKAVDIGPGLNLLQEDNPDLIGSEIARWLSTLEISG

SEQ ID NO: 237 - protein, 122 aa, Synthetic construct
MAEIGTGFPFDPHYVEVLGERMHYVDVGPRDGTPVLFLHGNPTSSYVWRNIIPHVAPTHRCIAPDLIGMGKSDKPDLGYFFDDHVRFMDAFIEALGLEEVVLVIHDWGSALGFHWAKRNPER

SEQ ID NO: 238 - protein, 174 aa, Synthetic construct
KGIAFMEFIRPIPTWDEWPEFARETFQAFRTTDVGRKLIIDQNVFIEGTLPMGVVRPLTEVEMDHYREPFLNPVDREPLWRFPNELPIAGEPANIVALVEEYMDWLHQSPVPKLLFWGTPGVLIPPAEAARLAKSLPNCKAVDIGPGLNLLQEDNPDLIGSEIARWLSTLEISG

SEQ ID NO: 239 - protein, 123 aa, Synthetic construct
MAEIGTGFPFDPHYVEVLGERMHYVDVGPRDGTPVLFLHGNPTSSYVWRNIIPHVAPTHRCIAPDLIGMGKSDKPDLGYFFDDHVRFMDAFIEALGLEEVVLVIHDWGSALGFHWAKRNPERV

SEQ ID NO: 240 - protein, 173 aa, Synthetic construct
GIAFMEFIRPIPTWDEWPEFARETFQAFRTTDVGRKLIIDQNVFIEGTLPMGVVRPLTEVEMDHYREPFLNPVDREPLWRFPNELPIAGEPANIVALVEEYMDWLHQSPVPKLLFWGTPGVLIPPAEAARLAKSLPNCKAVDIGPGLNLLQEDNPDLIGSEIARWLSTLEISG

SEQ ID NO: 241 - protein, 124 aa, Synthetic construct
MAEIGTGFPFDPHYVEVLGERMHYVDVGPRDGTPVLFLHGNPTSSYVWRNIIPHVAPTHRCIAPDLIGMGKSDKPDLGYFFDDHVRFMDAFIEALGLEEVVLVIHDWGSALGFHWAKRNPERVK

SEQ ID NO: 242 - protein, 172 aa, Synthetic construct
IAFMEFIRPIPTWDEWPEFARETFQAFRTTDVGRKLIIDQNVFIEGTLPMGVVRPLTEVEMDHYREPFLNPVDREPLWRFPNELPIAGEPANIVALVEEYMDWLHQSPVPKLLFWGTPGVLIPPAEAARLAKSLPNCKAVDIGPGLNLLQEDNPDLIGSEIARWLSTLEISG

SEQ ID NO: 243 - protein, 125 aa, Synthetic construct
MAEIGTGFPFDPHYVEVLGERMHYVDVGPRDGTPVLFLHGNPTSSYVWRNIIPHVAPTHRCIAPDLIGMGKSDKPDLGYFFDDHVRFMDAFIEALGLEEVVLVIHDWGSALGFHWAKRNPERVKG

SEQ ID NO: 244 - protein, 171 aa, Synthetic construct
AFMEFIRPIPTWDEWPEFARETFQAFRTTDVGRKLIIDQNVFIEGTLPMGVVRPLTEVEMDHYREPFLNPVDREPLWRFPNELPIAGEPANIVALVEEYMDWLHQSPVPKLLFWGTPGVLIPPAEAARLAKSLPNCKAVDIGPGLNLLQEDNPDLIGSEIARWLSTLEISG

SEQ ID NO: 245 - protein, 126 aa, Synthetic construct
MAEIGTGFPFDPHYVEVLGERMHYVDVGPRDGTPVLFLHGNPTSSYVWRNIIPHVAPTHRCIAPDLIGMGKSDKPDLGYFFDDHVRFMDAFIEALGLEEVVLVIHDWGSALGFHWAKRNPERVKGI

SEQ ID NO: 246 - protein, 170 aa, Synthetic construct
FMEFIRPIPTWDEWPEFARETFQAFRTTDVGRKLIIDQNVFIEGTLPMGVVRPLTEVEMDHYREPFLNPVDREPLWRFPNELPIAGEPANIVALVEEYMDWLHQSPVPKLLFWGTPGVLIPPAEAARLAKSLPNCKAVDIGPGLNLLQEDNPDLIGSEIARWLSTLEISG

SEQ ID NO: 247 - protein, 127 aa, Synthetic construct
MAEIGTGFPFDPHYVEVLGERMHYVDVGPRDGTPVLFLHGNPTSSYVWRNIIPHVAPTHRCIAPDLIGMGKSDKPDLGYFFDDHVRFMDAFIEALGLEEVVLVIHDWGSALGFHWAKRNPERVKGIA

SEQ ID NO: 248 - protein, 169 aa, Synthetic construct
MEFIRPIPTWDEWPEFARETFQAFRTTDVGRKLIIDQNVFIEGTLPMGVVRPLTEVEMDHYREPFLNPVDREPLWRFPNELPIAGEPANIVALVEEYMDWLHQSPVPKLLFWGTPGVLIPPAEAARLAKSLPNCKAVDIGPGLNLLQEDNPDLIGSEIARWLSTLEISG

SEQ ID NO: 249 - protein, 128 aa, Synthetic construct
MAEIGTGFPFDPHYVEVLGERMHYVDVGPRDGTPVLFLHGNPTSSYVWRNIIPHVAPTHRCIAPDLIGMGKSDKPDLGYFFDDHVRFMDAFIEALGLEEVVLVIHDWGSALGFHWAKRNPERVKGIAF

SEQ ID NO: 250 - protein, 168 aa, Synthetic construct
EFIRPIPTWDEWPEFARETFQAFRTTDVGRKLIIDQNVFIEGTLPMGVVRPLTEVEMDHYREPFLNPVDREPLWRFPNELPIAGEPANIVALVEEYMDWLHQSPVPKLLFWGTPGVLIPPAEAARLAKSLPNCKAVDIGPGLNLLQEDNPDLIGSEIARWLSTLEISG

SEQ ID NO: 251 - protein, 129 aa, Synthetic construct
MAEIGTGFPFDPHYVEVLGERMHYVDVGPRDGTPVLFLHGNPTSSYVWRNIIPHVAPTHRCIAPDLIGMGKSDKPDLGYFFDDHVRFMDAFIEALGLEEVVLVIHDWGSALGFHWAKRNPERVKGIAFM

SEQ ID NO: 252 - protein, 167 aa, Synthetic construct
FIRPIPTWDEWPEFARETFQAFRTTDVGRKLIIDQNVFIEGTLPMGVVRPLTEVEMDHYREPFLNPVDREPLWRFPNELPIAGEPANIVALVEEYMDWLHQSPVPKLLFWGTPGVLIPPAEAARLAKSLPNCKAVDIGPGLNLLQEDNPDLIGSEIARWLSTLEISG

SEQ ID NO: 253 - protein, 130 aa, Synthetic construct
MAEIGTGFPFDPHYVEVLGERMHYVDVGPRDGTPVLFLHGNPTSSYVWRNIIPHVAPTHRCIAPDLIGMGKSDKPDLGYFFDDHVRFMDAFIEALGLEEVVLVIHDWGSALGFHWAKRNPERVKGIAFME

SEQ ID NO: 254 - protein, 166 aa, Synthetic construct
IRPIPTWDEWPEFARETFQAFRTTDVGRKLIIDQNVFIEGTLPMGVVRPLTEVEMDHYREPFLNPVDREPLWRFPNELPIAGEPANIVALVEEYMDWLHQSPVPKLLFWGTPGVLIPPAEAARLAKSLPNCKAVDIGPGLNLLQEDNPDLIGSEIARWLSTLEISG

SEQ ID NO: 255 - protein, 131 aa, Synthetic construct
MAEIGTGFPFDPHYVEVLGERMHYVDVGPRDGTPVLFLHGNPTSSYVWRNIIPHVAPTHRCIAPDLIGMGKSDKPDLGYFFDDHVRFMDAFIEALGLEEVVLVIHDWGSALGFHWAKRNPERVKGIAFMEF

SEQ ID NO: 256 - protein, 165 aa, Synthetic construct
RPIPTWDEWPEFARETFQAFRTTDVGRKLIIDQNVFIEGTLPMGVVRPLTEVEMDHYREPFLNPVDREPLWRFPNELPIAGEPANIVALVEEYMDWLHQSPVPKLLFWGTPGVLIPPAEAARLAKSLPNCKAVDIGPGLNLLQEDNPDLIGSEIARWLSTLEISG

SEQ ID NO: 257 - protein, 132 aa, Synthetic construct
MAEIGTGFPFDPHYVEVLGERMHYVDVGPRDGTPVLFLHGNPTSSYVWRNIIPHVAPTHRCIAPDLIGMGKSDKPDLGYFFDDHVRFMDAFIEALGLEEVVLVIHDWGSALGFHWAKRNPERVKGIAFMEFI

SEQ ID NO: 258 - protein, 164 aa, Synthetic construct
PIPTWDEWPEFARETFQAFRTTDVGRKLIIDQNVFIEGTLPMGVVRPLTEVEMDHYREPFLNPVDREPLWRFPNELPIAGEPANIVALVEEYMDWLHQSPVPKLLFWGTPGVLIPPAEAARLAKSLPNCKAVDIGPGLNLLQEDNPDLIGSEIARWLSTLEISG

SEQ ID NO: 259 - protein, 133 aa, Synthetic construct
MAEIGTGFPFDPHYVEVLGERMHYVDVGPRDGTPVLFLHGNPTSSYVWRNIIPHVAPTHRCIAPDLIGMGKSDKPDLGYFFDDHVRFMDAFIEALGLEEVVLVIHDWGSALGFHWAKRNPERVKGIAFMEFIR

SEQ ID NO: 260 - protein, 163 aa, Synthetic construct
IPTWDEWPEFARETFQAFRTTDVGRKLIIDQNVFIEGTLPMGVVRPLTEVEMDHYREPFLNPVDREPLWRFPNELPIAGEPANIVALVEEYMDWLHQSPVPKLLFWGTPGVLIPPAEAARLAKSLPNCKAVDIGPGLNLLQEDNPDLIGSEIARWLSTLEISG

SEQ ID NO: 261 - protein, 134 aa, Synthetic construct
MAEIGTGFPFDPHYVEVLGERMHYVDVGPRDGTPVLFLHGNPTSSYVWRNIIPHVAPTHRCIAPDLIGMGKSDKPDLGYFFDDHVRFMDAFIEALGLEEVVLVIHDWGSALGFHWAKRNPERVKGIAFMEFIRP

SEQ ID NO: 262 - protein, 162 aa, Synthetic construct
PTWDEWPEFARETFQAFRTTDVGRKLIIDQNVFIEGTLPMGVVRPLTEVEMDHYREPFLNPVDREPLWRFPNELPIAGEPANIVALVEEYMDWLHQSPVPKLLFWGTPGVLIPPAEAARLAKSLPNCKAVDIGPGLNLLQEDNPDLIGSEIARWLSTLEISG

SEQ ID NO: 263 - protein, 135 aa, Synthetic construct
MAEIGTGFPFDPHYVEVLGERMHYVDVGPRDGTPVLFLHGNPTSSYVWRNIIPHVAPTHRCIAPDLIGMGKSDKPDLGYFFDDHVRFMDAFIEALGLEEVVLVIHDWGSALGFHWAKRNPERVKGIAFMEFIRPI

SEQ ID NO: 264 - protein, 161 aa, Synthetic construct
TWDEWPEFARETFQAFRTTDVGRKLIIDQNVFIEGTLPMGVVRPLTEVEMDHYREPFLNPVDREPLWRFPNELPIAGEPANIVALVEEYMDWLHQSPVPKLLFWGTPGVLIPPAEAARLAKSLPNCKAVDIGPGLNLLQEDNPDLIGSEIARWLSTLEISG

SEQ ID NO: 265 - protein, 136 aa, Synthetic construct
MAEIGTGFPFDPHYVEVLGERMHYVDVGPRDGTPVLFLHGNPTSSYVWRNIIPHVAPTHRCIAPDLIGMGKSDKPDLGYFFDDHVRFMDAFIEALGLEEVVLVIHDWGSALGFHWAKRNPERVKGIAFMEFIRPIP

SEQ ID NO: 266 - protein, 160 aa, Synthetic construct
WDEWPEFARETFQAFRTTDVGRKLIIDQNVFIEGTLPMGVVRPLTEVEMDHYREPFLNPVDREPLWRFPNELPIAGEPANIVALVEEYMDWLHQSPVPKLLFWGTPGVLIPPAEAARLAKSLPNCKAVDIGPGLNLLQEDNPDLIGSEIARWLSTLEISG

SEQ ID NO: 267 - protein, 137 aa, Synthetic construct
MAEIGTGFPFDPHYVEVLGERMHYVDVGPRDGTPVLFLHGNPTSSYVWRNIIPHVAPTHRCIAPDLIGMGKSDKPDLGYFFDDHVRFMDAFIEALGLEEVVLVIHDWGSALGFHWAKRNPERVKGIAFMEFIRPIPT

SEQ ID NO: 268 - protein, 159 aa, Synthetic construct
DEWPEFARETFQAFRTTDVGRKLIIDQNVFIEGTLPMGVVRPLTEVEMDHYREPFLNPVDREPLWRFPNELPIAGEPANIVALVEEYMDWLHQSPVPKLLFWGTPGVLIPPAEAARLAKSLPNCKAVDIGPGLNLLQEDNPDLIGSEIARWLSTLEISG

SEQ ID NO: 269 - protein, 138 aa, Synthetic construct
MAEIGTGFPFDPHYVEVLGERMHYVDVGPRDGTPVLFLHGNPTSSYVWRNIIPHVAPTHRCIAPDLIGMGKSDKPDLGYFFDDHVRFMDAFIEALGLEEVVLVIHDWGSALGFHWAKRNPERVKGIAFMEFIRPIPTW

SEQ ID NO: 270 - protein, 158 aa, Synthetic construct
EWPEFARETFQAFRTTDVGRKLIIDQNVFIEGTLPMGVVRPLTEVEMDHYREPFLNPVDREPLWRFPNELPIAGEPANIVALVEEYMDWLHQSPVPKLLFWGTPGVLIPPAEAARLAKSLPNCKAVDIGPGLNLLQEDNPDLIGSEIARWLSTLEISG

SEQ ID NO: 271 - protein, 139 aa, Synthetic construct
MAEIGTGFPFDPHYVEVLGERMHYVDVGPRDGTPVLFLHGNPTSSYVWRNIIPHVAPTHRCIAPDLIGMGKSDKPDLGYFFDDHVRFMDAFIEALGLEEVVLVIHDWGSALGFHWAKRNPERVKGIAFMEFIRPIPTWD

SEQ ID NO: 272 - protein, 157 aa, Synthetic construct
WPEFARETFQAFRTTDVGRKLIIDQNVFIEGTLPMGVVRPLTEVEMDHYREPFLNPVDREPLWRFPNELPIAGEPANIVALVEEYMDWLHQSPVPKLLFWGTPGVLIPPAEAARLAKSLPNCKAVDIGPGLNLLQEDNPDLIGSEIARWLSTLEISG

SEQ ID NO: 273 - protein, 140 aa, Synthetic construct
MAEIGTGFPFDPHYVEVLGERMHYVDVGPRDGTPVLFLHGNPTSSYVWRNIIPHVAPTHRCIAPDLIGMGKSDKPDLGYFFDDHVRFMDAFIEALGLEEVVLVIHDWGSALGFHWAKRNPERVKGIAFMEFIRPIPTWDE

SEQ ID NO: 274 - protein, 156 aa, Synthetic construct
PEFARETFQAFRTTDVGRKLIIDQNVFIEGTLPMGVVRPLTEVEMDHYREPFLNPVDREPLWRFPNELPIAGEPANIVALVEEYMDWLHQSPVPKLLFWGTPGVLIPPAEAARLAKSLPNCKAVDIGPGLNLLQEDNPDLIGSEIARWLSTLEISG

SEQ ID NO: 275 - protein, 141 aa, Synthetic construct
MAEIGTGFPFDPHYVEVLGERMHYVDVGPRDGTPVLFLHGNPTSSYVWRNIIPHVAPTHRCIAPDLIGMGKSDKPDLGYFFDDHVRFMDAFIEALGLEEVVLVIHDWGSALGFHWAKRNPERVKGIAFMEFIRPIPTWDEW

SEQ ID NO: 276 - protein, 155 aa, Synthetic construct
EFARETFQAFRTTDVGRKLIIDQNVFIEGTLPMGVVRPLTEVEMDHYREPFLNPVDREPLWRFPNELPIAGEPANIVALVEEYMDWLHQSPVPKLLFWGTPGVLIPPAEAARLAKSLPNCKAVDIGPGLNLLQEDNPDLIGSEIARWLSTLEISG

SEQ ID NO: 277 - protein, 142 aa, Synthetic construct
MAEIGTGFPFDPHYVEVLGERMHYVDVGPRDGTPVLFLHGNPTSSYVWRNIIPHVAPTHRCIAPDLIGMGKSDKPDLGYFFDDHVRFMDAFIEALGLEEVVLVIHDWGSALGFHWAKRNPERVKGIAFMEFIRPIPTWDEWP

SEQ ID NO: 278 - protein, 154 aa, Synthetic construct
FARETFQAFRTTDVGRKLIIDQNVFIEGTLPMGVVRPLTEVEMDHYREPFLNPVDREPLWRFPNELPIAGEPANIVALVEEYMDWLHQSPVPKLLFWGTPGVLIPPAEAARLAKSLPNCKAVDIGPGLNLLQEDNPDLIGSEIARWLSTLEISG

SEQ ID NO: 279 - protein, 143 aa, Synthetic construct
MAEIGTGFPFDPHYVEVLGERMHYVDVGPRDGTPVLFLHGNPTSSYVWRNIIPHVAPTHRCIAPDLIGMGKSDKPDLGYFFDDHVRFMDAFIEALGLEEVVLVIHDWGSALGFHWAKRNPERVKGIAFMEFIRPIPTWDEWPE

SEQ ID NO: 280 - protein, 153 aa, Synthetic construct
ARETFQAFRTTDVGRKLIIDQNVFIEGTLPMGVVRPLTEVEMDHYREPFLNPVDREPLWRFPNELPIAGEPANIVALVEEYMDWLHQSPVPKLLFWGTPGVLIPPAEAARLAKSLPNCKAVDIGPGLNLLQEDNPDLIGSEIARWLSTLEISG

SEQ ID NO: 281 - protein, 144 aa, Synthetic construct
MAEIGTGFPFDPHYVEVLGERMHYVDVGPRDGTPVLFLHGNPTSSYVWRNIIPHVAPTHRCIAPDLIGMGKSDKPDLGYFFDDHVRFMDAFIEALGLEEVVLVIHDWGSALGFHWAKRNPERVKGIAFMEFIRPIPTWDEWPEF

SEQ ID NO: 282 - protein, 152 aa, Synthetic construct
RETFQAFRTTDVGRKLIIDQNVFIEGTLPMGVVRPLTEVEMDHYREPFLNPVDREPLWRFPNELPIAGEPANIVALVEEYMDWLHQSPVPKLLFWGTPGVLIPPAEAARLAKSLPNCKAVDIGPGLNLLQEDNPDLIGSEIARWLSTLEISG

SEQ ID NO: 283 - protein, 145 aa, Synthetic construct
MAEIGTGFPFDPHYVEVLGERMHYVDVGPRDGTPVLFLHGNPTSSYVWRNIIPHVAPTHRCIAPDLIGMGKSDKPDLGYFFDDHVRFMDAFIEALGLEEVVLVIHDWGSALGFHWAKRNPERVKGIAFMEFIRPIPTWDEWPEFA

SEQ ID NO: 284 - protein, 151 aa, Synthetic construct
ETFQAFRTTDVGRKLIIDQNVFIEGTLPMGVVRPLTEVEMDHYREPFLNPVDREPLWRFPNELPIAGEPANIVALVEEYMDWLHQSPVPKLLFWGTPGVLIPPAEAARLAKSLPNCKAVDIGPGLNLLQEDNPDLIGSEIARWLSTLEISG

SEQ ID NO: 285 - protein, 146 aa, Synthetic construct
MAEIGTGFPFDPHYVEVLGERMHYVDVGPRDGTPVLFLHGNPTSSYVWRNIIPHVAPTHRCIAPDLIGMGKSDKPDLGYFFDDHVRFMDAFIEALGLEEVVLVIHDWGSALGFHWAKRNPERVKGIAFMEFIRPIPTWDEWPEFAR

SEQ ID NO: 286 - protein, 150 aa, Synthetic construct
TFQAFRTTDVGRKLIIDQNVFIEGTLPMGVVRPLTEVEMDHYREPFLNPVDREPLWRFPNELPIAGEPANIVALVEEYMDWLHQSPVPKLLFWGTPGVLIPPAEAARLAKSLPNCKAVDIGPGLNLLQEDNPDLIGSEIARWLSTLEISG

SEQ ID NO: 287 - protein, 147 aa, Synthetic construct
MAEIGTGFPFDPHYVEVLGERMHYVDVGPRDGTPVLFLHGNPTSSYVWRNIIPHVAPTHRCIAPDLIGMGKSDKPDLGYFFDDHVRFMDAFIEALGLEEVVLVIHDWGSALGFHWAKRNPERVKGIAFMEFIRPIPTWDEWPEFARE

SEQ ID NO: 288 - protein, 149 aa, Synthetic construct
FQAFRTTDVGRKLIIDQNVFIEGTLPMGVVRPLTEVEMDHYREPFLNPVDREPLWRFPNELPIAGEPANIVALVEEYMDWLHQSPVPKLLFWGTPGVLIPPAEAARLAKSLPNCKAVDIGPGLNLLQEDNPDLIGSEIARWLSTLEISG

SEQ ID NO: 289 - protein, 148 aa, Synthetic construct
MAEIGTGFPFDPHYVEVLGERMHYVDVGPRDGTPVLFLHGNPTSSYVWRNIIPHVAPTHRCIAPDLIGMGKSDKPDLGYFFDDHVRFMDAFIEALGLEEVVLVIHDWGSALGFHWAKRNPERVKGIAFMEFIRPIPTWDEWPEFARET

SEQ ID NO: 290 - protein, 148 aa, Synthetic construct
QAFRTTDVGRKLIIDQNVFIEGTLPMGVVRPLTEVEMDHYREPFLNPVDREPLWRFPNELPIAGEPANIVALVEEYMDWLHQSPVPKLLFWGTPGVLIPPAEAARLAKSLPNCKAVDIGPGLNLLQEDNPDLIGSEIARWLSTLEISG

SEQ ID NO: 291 - protein, 149 aa, Synthetic construct
MAEIGTGFPFDPHYVEVLGERMHYVDVGPRDGTPVLFLHGNPTSSYVWRNIIPHVAPTHRCIAPDLIGMGKSDKPDLGYFFDDHVRFMDAFIEALGLEEVVLVIHDWGSALGFHWAKRNPERVKGIAFMEFIRPIPTWDEWPEFARETF

SEQ ID NO: 292 - protein, 147 aa, Synthetic construct
AFRTTDVGRKLIIDQNVFIEGTLPMGVVRPLTEVEMDHYREPFLNPVDREPLWRFPNELPIAGEPANIVALVEEYMDWLHQSPVPKLLFWGTPGVLIPPAEAARLAKSLPNCKAVDIGPGLNLLQEDNPDLIGSEIARWLSTLEISG

SEQ ID NO: 293 - protein, 150 aa, Synthetic construct
MAEIGTGFPFDPHYVEVLGERMHYVDVGPRDGTPVLFLHGNPTSSYVWRNIIPHVAPTHRCIAPDLIGMGKSDKPDLGYFFDDHVRFMDAFIEALGLEEVVLVIHDWGSALGFHWAKRNPERVKGIAFMEFIRPIPTWDEWPEFARETFQ

SEQ ID NO: 294 - protein, 146 aa, Synthetic construct
FRTTDVGRKLIIDQNVFIEGTLPMGVVRPLTEVEMDHYREPFLNPVDREPLWRFPNELPIAGEPANIVALVEEYMDWLHQSPVPKLLFWGTPGVLIPPAEAARLAKSLPNCKAVDIGPGLNLLQEDNPDLIGSEIARWLSTLEISG

SEQ ID NO: 295 - protein, 151 aa, Synthetic construct
MAEIGTGFPFDPHYVEVLGERMHYVDVGPRDGTPVLFLHGNPTSSYVWRNIIPHVAPTHRCIAPDLIGMGKSDKPDLGYFFDDHVRFMDAFIEALGLEEVVLVIHDWGSALGFHWAKRNPERVKGIAFMEFIRPIPTWDEWPEFARETFQA

SEQ ID NO: 296 - protein, 145 aa, Synthetic construct
RTTDVGRKLIIDQNVFIEGTLPMGVVRPLTEVEMDHYREPFLNPVDREPLWRFPNELPIAGEPANIVALVEEYMDWLHQSPVPKLLFWGTPGVLIPPAEAARLAKSLPNCKAVDIGPGLNLLQEDNPDLIGSEIARWLSTLEISG

SEQ ID NO: 297 - protein, 152 aa, Synthetic construct
MAEIGTGFPFDPHYVEVLGERMHYVDVGPRDGTPVLFLHGNPTSSYVWRNIIPHVAPTHRCIAPDLIGMGKSDKPDLGYFFDDHVRFMDAFIEALGLEEVVLVIHDWGSALGFHWAKRNPERVKGIAFMEFIRPIPTWDEWPEFARETFQAF

SEQ ID NO: 298 - protein, 144 aa, Synthetic construct
TTDVGRKLIIDQNVFIEGTLPMGVVRPLTEVEMDHYREPFLNPVDREPLWRFPNELPIAGEPANIVALVEEYMDWLHQSPVPKLLFWGTPGVLIPPAEAARLAKSLPNCKAVDIGPGLNLLQEDNPDLIGSEIARWLSTLEISG

SEQ ID NO: 299 - protein, 153 aa, Synthetic construct
MAEIGTGFPFDPHYVEVLGERMHYVDVGPRDGTPVLFLHGNPTSSYVWRNIIPHVAPTHRCIAPDLIGMGKSDKPDLGYFFDDHVRFMDAFIEALGLEEVVLVIHDWGSALGFHWAKRNPERVKGIAFMEFIRPIPTWDEWPEFARETFQAFR

SEQ ID NO: 300 - protein, 143 aa, Synthetic construct
TDVGRKLIIDQNVFIEGTLPMGVVRPLTEVEMDHYREPFLNPVDREPLWRFPNELPIAGEPANIVALVEEYMDWLHQSPVPKLLFWGTPGVLIPPAEAARLAKSLPNCKAVDIGPGLNLLQEDNPDLIGSEIARWLSTLEISG

SEQ ID NO: 301 - protein, 154 aa, Synthetic construct
MAEIGTGFPFDPHYVEVLGERMHYVDVGPRDGTPVLFLHGNPTSSYVWRNIIPHVAPTHRCIAPDLIGMGKSDKPDLGYFFDDHVRFMDAFIEALGLEEVVLVIHDWGSALGFHWAKRNPERVKGIAFMEFIRPIPTWDEWPEFARETFQAFRT

SEQ ID NO: 302 - protein, 142 aa, Synthetic construct
DVGRKLIIDQNVFIEGTLPMGVVRPLTEVEMDHYREPFLNPVDREPLWRFPNELPIAGEPANIVALVEEYMDWLHQSPVPKLLFWGTPGVLIPPAEAARLAKSLPNCKAVDIGPGLNLLQEDNPDLIGSEIARWLSTLEISG

SEQ ID NO: 303 - protein, 155 aa, Synthetic construct
MAEIGTGFPFDPHYVEVLGERMHYVDVGPRDGTPVLFLHGNPTSSYVWRNIIPHVAPTHRCIAPDLIGMGKSDKPDLGYFFDDHVRFMDAFIEALGLEEVVLVIHDWGSALGFHWAKRNPERVKGIAFMEFIRPIPTWDEWPEFARETFQAFRTT

SEQ ID NO: 304 - protein, 141 aa, Synthetic construct
VGRKLIIDQNVFIEGTLPMGVVRPLTEVEMDHYREPFLNPVDREPLWRFPNELPIAGEPANIVALVEEYMDWLHQSPVPKLLFWGTPGVLIPPAEAARLAKSLPNCKAVDIGPGLNLLQEDNPDLIGSEIARWLSTLEISG

SEQ ID NO: 305 - protein, 156 aa, Synthetic construct
MAEIGTGFPFDPHYVEVLGERMHYVDVGPRDGTPVLFLHGNPTSSYVWRNIIPHVAPTHRCIAPDLIGMGKSDKPDLGYFFDDHVRFMDAFIEALGLEEVVLVIHDWGSALGFHWAKRNPERVKGIAFMEFIRPIPTWDEWPEFARETFQAFRTTD

SEQ ID NO: 306 - protein, 140 aa, Synthetic construct
GRKLIIDQNVFIEGTLPMGVVRPLTEVEMDHYREPFLNPVDREPLWRFPNELPIAGEPANIVALVEEYMDWLHQSPVPKLLFWGTPGVLIPPAEAARLAKSLPNCKAVDIGPGLNLLQEDNPDLIGSEIARWLSTLEISG

SEQ ID NO: 307 - protein, 157 aa, Synthetic construct
MAEIGTGFPFDPHYVEVLGERMHYVDVGPRDGTPVLFLHGNPTSSYVWRNIIPHVAPTHRCIAPDLIGMGKSDKPDLGYFFDDHVRFMDAFIEALGLEEVVLVIHDWGSALGFHWAKRNPERVKGIAFMEFIRPIPTWDEWPEFARETFQAFRTTDV

SEQ ID NO: 308 - protein, 139 aa, Synthetic construct
RKLIIDQNVFIEGTLPMGVVRPLTEVEMDHYREPFLNPVDREPLWRFPNELPIAGEPANIVALVEEYMDWLHQSPVPKLLFWGTPGVLIPPAEAARLAKSLPNCKAVDIGPGLNLLQEDNPDLIGSEIARWLSTLEISG

SEQ ID NO: 309 - protein, 158 aa, Synthetic construct
MAEIGTGFPFDPHYVEVLGERMHYVDVGPRDGTPVLFLHGNPTSSYVWRNIIPHVAPTHRCIAPDLIGMGKSDKPDLGYFFDDHVRFMDAFIEALGLEEVVLVIHDWGSALGFHWAKRNPERVKGIAFMEFIRPIPTWDEWPEFARETFQAFRTTDVG

SEQ ID NO: 310 - protein, 138 aa, Synthetic construct
KLIIDQNVFIEGTLPMGVVRPLTEVEMDHYREPFLNPVDREPLWRFPNELPIAGEPANIVALVEEYMDWLHQSPVPKLLFWGTPGVLIPPAEAARLAKSLPNCKAVDIGPGLNLLQEDNPDLIGSEIARWLSTLEISG

SEQ ID NO: 311 - protein, 159 aa, Synthetic construct
MAEIGTGFPFDPHYVEVLGERMHYVDVGPRDGTPVLFLHGNPTSSYVWRNIIPHVAPTHRCIAPDLIGMGKSDKPDLGYFFDDHVRFMDAFIEALGLEEVVLVIHDWGSALGFHWAKRNPERVKGIAFMEFIRPIPTWDEWPEFARETFQAFRTTDVGR

SEQ ID NO: 312 - protein, 137 aa, Synthetic construct
LIIDQNVFIEGTLPMGVVRPLTEVEMDHYREPFLNPVDREPLWRFPNELPIAGEPANIVALVEEYMDWLHQSPVPKLLFWGTPGVLIPPAEAARLAKSLPNCKAVDIGPGLNLLQEDNPDLIGSEIARWLSTLEISG

SEQ ID NO: 313 - protein, 160 aa, Synthetic construct
MAEIGTGFPFDPHYVEVLGERMHYVDVGPRDGTPVLFLHGNPTSSYVWRNIIPHVAPTHRCIAPDLIGMGKSDKPDLGYFFDDHVRFMDAFIEALGLEEVVLVIHDWGSALGFHWAKRNPERVKGIAFMEFIRPIPTWDEWPEFARETFQAFRTTDVGRK

SEQ ID NO: 314 - protein, 136 aa, Synthetic construct
IIDQNVFIEGTLPMGVVRPLTEVEMDHYREPFLNPVDREPLWRFPNELPIAGEPANIVALVEEYMDWLHQSPVPKLLFWGTPGVLIPPAEAARLAKSLPNCKAVDIGPGLNLLQEDNPDLIGSEIARWLSTLEISG

SEQ ID NO: 315 - protein, 161 aa, Synthetic construct
MAEIGTGFPFDPHYVEVLGERMHYVDVGPRDGTPVLFLHGNPTSSYVWRNIIPHVAPTHRCIAPDLIGMGKSDKPDLGYFFDDHVRFMDAFIEALGLEEVVLVIHDWGSALGFHWAKRNPERVKGIAFMEFIRPIPTWDEWPEFARETFQAFRTTDVGRKL

SEQ ID NO: 316 - protein, 135 aa, Synthetic construct
IDQNVFIEGTLPMGVVRPLTEVEMDHYREPFLNPVDREPLWRFPNELPIAGEPANIVALVEEYMDWLHQSPVPKLLFWGTPGVLIPPAEAARLAKSLPNCKAVDIGPGLNLLQEDNPDLIGSEIARWLSTLEISG

SEQ ID NO: 317 - protein, 162 aa, Synthetic construct
MAEIGTGFPFDPHYVEVLGERMHYVDVGPRDGTPVLFLHGNPTSSYVWRNIIPHVAPTHRCIAPDLIGMGKSDKPDLGYFFDDHVRFMDAFIEALGLEEVVLVIHDWGSALGFHWAKRNPERVKGIAFMEFIRPIPTWDEWPEFARETFQAFRTTDVGRKLI

SEQ ID NO: 318 - protein, 134 aa, Synthetic construct
DQNVFIEGTLPMGVVRPLTEVEMDHYREPFLNPVDREPLWRFPNELPIAGEPANIVALVEEYMDWLHQSPVPKLLFWGTPGVLIPPAEAARLAKSLPNCKAVDIGPGLNLLQEDNPDLIGSEIARWLSTLEISG

SEQ ID NO: 319 - protein, 163 aa, Synthetic construct
MAEIGTGFPFDPHYVEVLGERMHYVDVGPRDGTPVLFLHGNPTSSYVWRNIIPHVAPTHRCIAPDLIGMGKSDKPDLGYFFDDHVRFMDAFIEALGLEEVVLVIHDWGSALGFHWAKRNPERVKGIAFMEFIRPIPTWDEWPEFARETFQAFRTTDVGRKLII

SEQ ID NO: 320 - protein, 133 aa, Synthetic construct
QNVFIEGTLPMGVVRPLTEVEMDHYREPFLNPVDREPLWRFPNELPIAGEPANIVALVEEYMDWLHQSPVPKLLFWGTPGVLIPPAEAARLAKSLPNCKAVDIGPGLNLLQEDNPDLIGSEIARWLSTLEISG

SEQ ID NO: 321 - protein, 164 aa, Synthetic construct
MAEIGTGFPFDPHYVEVLGERMHYVDVGPRDGTPVLFLHGNPTSSYVWRNIIPHVAPTHRCIAPDLIGMGKSDKPDLGYFFDDHVRFMDAFIEALGLEEVVLVIHDWGSALGFHWAKRNPERVKGIAFMEFIRPIPTWDEWPEFARETFQAFRTTDVGRKLIID

SEQ ID NO: 322 - protein, 132 aa, Synthetic construct
NVFIEGTLPMGVVRPLTEVEMDHYREPFLNPVDREPLWRFPNELPIAGEPANIVALVEEYMDWLHQSPVPKLLFWGTPGVLIPPAEAARLAKSLPNCKAVDIGPGLNLLQEDNPDLIGSEIARWLSTLEISG

SEQ ID NO: 323 - protein, 165 aa, Synthetic construct
MAEIGTGFPFDPHYVEVLGERMHYVDVGPRDGTPVLFLHGNPTSSYVWRNIIPHVAPTHRCIAPDLIGMGKSDKPDLGYFFDDHVRFMDAFIEALGLEEVVLVIHDWGSALGFHWAKRNPERVKGIAFMEFIRPIPTWDEWPEFARETFQAFRTTDVGRKLIIDQ

SEQ ID NO: 324 - protein, 131 aa, Synthetic construct
VFIEGTLPMGVVRPLTEVEMDHYREPFLNPVDREPLWRFPNELPIAGEPANIVALVEEYMDWLHQSPVPKLLFWGTPGVLIPPAEAARLAKSLPNCKAVDIGPGLNLLQEDNPDLIGSEIARWLSTLEISG

SEQ ID NO: 325 - protein, 166 aa, Synthetic construct
MAEIGTGFPFDPHYVEVLGERMHYVDVGPRDGTPVLFLHGNPTSSYVWRNIIPHVAPTHRCIAPDLIGMGKSDKPDLGYFFDDHVRFMDAFIEALGLEEVVLVIHDWGSALGFHWAKRNPERVKGIAFMEFIRPIPTWDEWPEFARETFQAFRTTDVGRKLIIDQN

SEQ ID NO: 326 - protein, 130 aa, Synthetic construct
FIEGTLPMGVVRPLTEVEMDHYREPFLNPVDREPLWRFPNELPIAGEPANIVALVEEYMDWLHQSPVPKLLFWGTPGVLIPPAEAARLAKSLPNCKAVDIGPGLNLLQEDNPDLIGSEIARWLSTLEISG

SEQ ID NO: 327 - protein, 167 aa, Synthetic construct
MAEIGTGFPFDPHYVEVLGERMHYVDVGPRDGTPVLFLHGNPTSSYVWRNIIPHVAPTHRCIAPDLIGMGKSDKPDLGYFFDDHVRFMDAFIEALGLEEVVLVIHDWGSALGFHWAKRNPERVKGIAFMEFIRPIPTWDEWPEFARETFQAFRTTDVGRKLIIDQNV

SEQ ID NO: 328 - protein, 129 aa, Synthetic construct
IEGTLPMGVVRPLTEVEMDHYREPFLNPVDREPLWRFPNELPIAGEPANIVALVEEYMDWLHQSPVPKLLFWGTPGVLIPPAEAARLAKSLPNCKAVDIGPGLNLLQEDNPDLIGSEIARWLSTLEISG

SEQ ID NO: 329 - protein, 168 aa, Synthetic construct
MAEIGTGFPFDPHYVEVLGERMHYVDVGPRDGTPVLFLHGNPTSSYVWRNIIPHVAPTHRCIAPDLIGMGKSDKPDLGYFFDDHVRFMDAFIEALGLEEVVLVIHDWGSALGFHWAKRNPERVKGIAFMEFIRPIPTWDEWPEFARETFQAFRTTDVGRKLIIDQNVF

SEQ ID NO: 330 - protein, 128 aa, Synthetic construct
EGTLPMGVVRPLTEVEMDHYREPFLNPVDREPLWRFPNELPIAGEPANIVALVEEYMDWLHQSPVPKLLFWGTPGVLIPPAEAARLAKSLPNCKAVDIGPGLNLLQEDNPDLIGSEIARWLSTLEISG

SEQ ID NO: 331 - protein, 169 aa, Synthetic construct
MAEIGTGFPFDPHYVEVLGERMHYVDVGPRDGTPVLFLHGNPTSSYVWRNIIPHVAPTHRCIAPDLIGMGKSDKPDLGYFFDDHVRFMDAFIEALGLEEVVLVIHDWGSALGFHWAKRNPERVKGIAFMEFIRPIPTWDEWPEFARETFQAFRTTDVGRKLIIDQNVFI

SEQ ID NO: 332 - protein, 127 aa, Synthetic construct
GTLPMGVVRPLTEVEMDHYREPFLNPVDREPLWRFPNELPIAGEPANIVALVEEYMDWLHQSPVPKLLFWGTPGVLIPPAEAARLAKSLPNCKAVDIGPGLNLLQEDNPDLIGSEIARWLSTLEISG

SEQ ID NO: 333 - protein, 170 aa, Synthetic construct
MAEIGTGFPFDPHYVEVLGERMHYVDVGPRDGTPVLFLHGNPTSSYVWRNIIPHVAPTHRCIAPDLIGMGKSDKPDLGYFFDDHVRFMDAFIEALGLEEVVLVIHDWGSALGFHWAKRNPERVKGIAFMEFIRPIPTWDEWPEFARETFQAFRTTDVGRKLIIDQNVFIE

SEQ ID NO: 334 - protein, 126 aa, Synthetic construct
TLPMGVVRPLTEVEMDHYREPFLNPVDREPLWRFPNELPIAGEPANIVALVEEYMDWLHQSPVPKLLFWGTPGVLIPPAEAARLAKSLPNCKAVDIGPGLNLLQEDNPDLIGSEIARWLSTLEISG

SEQ ID NO: 335 - protein, 171 aa, Synthetic construct
MAEIGTGFPFDPHYVEVLGERMHYVDVGPRDGTPVLFLHGNPTSSYVWRNIIPHVAPTHRCIAPDLIGMGKSDKPDLGYFFDDHVRFMDAFIEALGLEEVVLVIHDWGSALGFHWAKRNPERVKGIAFMEFIRPIPTWDEWPEFARETFQAFRTTDVGRKLIIDQNVFIEG

SEQ ID NO: 336 - protein, 125 aa, Synthetic construct
LPMGVVRPLTEVEMDHYREPFLNPVDREPLWRFPNELPIAGEPANIVALVEEYMDWLHQSPVPKLLFWGTPGVLIPPAEAARLAKSLPNCKAVDIGPGLNLLQEDNPDLIGSEIARWLSTLEISG

SEQ ID NO: 337 - protein, 172 aa, Synthetic construct
MAEIGTGFPFDPHYVEVLGERMHYVDVGPRDGTPVLFLHGNPTSSYVWRNIIPHVAPTHRCIAPDLIGMGKSDKPDLGYFFDDHVRFMDAFIEALGLEEVVLVIHDWGSALGFHWAKRNPERVKGIAFMEFIRPIPTWDEWPEFARETFQAFRTTDVGRKLIIDQNVFIEGT

SEQ ID NO: 338 - protein, 124 aa, Synthetic construct
PMGVVRPLTEVEMDHYREPFLNPVDREPLWRFPNELPIAGEPANIVALVEEYMDWLHQSPVPKLLFWGTPGVLIPPAEAARLAKSLPNCKAVDIGPGLNLLQEDNPDLIGSEIARWLSTLEISG

SEQ ID NO: 339 - protein, 173 aa, Synthetic construct
MAEIGTGFPFDPHYVEVLGERMHYVDVGPRDGTPVLFLHGNPTSSYVWRNIIPHVAPTHRCIAPDLIGMGKSDKPDLGYFFDDHVRFMDAFIEALGLEEVVLVIHDWGSALGFHWAKRNPERVKGIAFMEFIRPIPTWDEWPEFARETFQAFRTTDVGRKLIIDQNVFIEGTL

SEQ ID NO: 340 - protein, 123 aa, Synthetic construct
MGVVRPLTEVEMDHYREPFLNPVDREPLWRFPNELPIAGEPANIVALVEEYMDWLHQSPVPKLLFWGTPGVLIPPAEAARLAKSLPNCKAVDIGPGLNLLQEDNPDLIGSEIARWLSTLEISG

SEQ ID NO: 341 - protein, 174 aa, Synthetic construct
MAEIGTGFPFDPHYVEVLGERMHYVDVGPRDGTPVLFLHGNPTSSYVWRNIIPHVAPTHRCIAPDLIGMGKSDKPDLGYFFDDHVRFMDAFIEALGLEEVVLVIHDWGSALGFHWAKRNPERVKGIAFMEFIRPIPTWDEWPEFARETFQAFRTTDVGRKLIIDQNVFIEGTLP

SEQ ID NO: 342 - protein, 122 aa, Synthetic construct
GVVRPLTEVEMDHYREPFLNPVDREPLWRFPNELPIAGEPANIVALVEEYMDWLHQSPVPKLLFWGTPGVLIPPAEAARLAKSLPNCKAVDIGPGLNLLQEDNPDLIGSEIARWLSTLEISG

SEQ ID NO: 343 - protein, 175 aa, Synthetic construct
MAEIGTGFPFDPHYVEVLGERMHYVDVGPRDGTPVLFLHGNPTSSYVWRNIIPHVAPTHRCIAPDLIGMGKSDKPDLGYFFDDHVRFMDAFIEALGLEEVVLVIHDWGSALGFHWAKRNPERVKGIAFMEFIRPIPTWDEWPEFARETFQAFRTTDVGRKLIIDQNVFIEGTLPM

SEQ ID NO: 344 - protein, 121 aa, Synthetic construct
VVRPLTEVEMDHYREPFLNPVDREPLWRFPNELPIAGEPANIVALVEEYMDWLHQSPVPKLLFWGTPGVLIPPAEAARLAKSLPNCKAVDIGPGLNLLQEDNPDLIGSEIARWLSTLEISG

SEQ ID NO: 345 - protein, 176 aa, Synthetic construct
MAEIGTGFPFDPHYVEVLGERMHYVDVGPRDGTPVLFLHGNPTSSYVWRNIIPHVAPTHRCIAPDLIGMGKSDKPDLGYFFDDHVRFMDAFIEALGLEEVVLVIHDWGSALGFHWAKRNPERVKGIAFMEFIRPIPTWDEWPEFARETFQAFRTTDVGRKLIIDQNVFIEGTLPMG

SEQ ID NO: 346 - protein, 120 aa, Synthetic construct
VRPLTEVEMDHYREPFLNPVDREPLWRFPNELPIAGEPANIVALVEEYMDWLHQSPVPKLLFWGTPGVLIPPAEAARLAKSLPNCKAVDIGPGLNLLQEDNPDLIGSEIARWLSTLEISG

SEQ ID NO: 347 - protein, 177 aa, Synthetic construct
MAEIGTGFPFDPHYVEVLGERMHYVDVGPRDGTPVLFLHGNPTSSYVWRNIIPHVAPTHRCIAPDLIGMGKSDKPDLGYFFDDHVRFMDAFIEALGLEEVVLVIHDWGSALGFHWAKRNPERVKGIAFMEFIRPIPTWDEWPEFARETFQAFRTTDVGRKLIIDQNVFIEGTLPMGV

SEQ ID NO: 348 - protein, 119 aa, Synthetic construct
RPLTEVEMDHYREPFLNPVDREPLWRFPNELPIAGEPANIVALVEEYMDWLHQSPVPKLLFWGTPGVLIPPAEAARLAKSLPNCKAVDIGPGLNLLQEDNPDLIGSEIARWLSTLEISG

SEQ ID NO: 349 - protein, 178 aa, Synthetic construct
MAEIGTGFPFDPHYVEVLGERMHYVDVGPRDGTPVLFLHGNPTSSYVWRNIIPHVAPTHRCIAPDLIGMGKSDKPDLGYFFDDHVRFMDAFIEALGLEEVVLVIHDWGSALGFHWAKRNPERVKGIAFMEFIRPIPTWDEWPEFARETFQAFRTTDVGRKLIIDQNVFIEGTLPMGVV

SEQ ID NO: 350 - protein, 118 aa, Synthetic construct
PLTEVEMDHYREPFLNPVDREPLWRFPNELPIAGEPANIVALVEEYMDWLHQSPVPKLLFWGTPGVLIPPAEAARLAKSLPNCKAVDIGPGLNLLQEDNPDLIGSEIARWLSTLEISG

SEQ ID NO: 351 - protein, 179 aa, Synthetic construct
MAEIGTGFPFDPHYVEVLGERMHYVDVGPRDGTPVLFLHGNPTSSYVWRNIIPHVAPTHRCIAPDLIGMGKSDKPDLGYFFDDHVRFMDAFIEALGLEEVVLVIHDWGSALGFHWAKRNPERVKGIAFMEFIRPIPTWDEWPEFARETFQAFRTTDVGRKLIIDQNVFIEGTLPMGVVR

SEQ ID NO: 352 - protein, 117 aa, Synthetic construct
LTEVEMDHYREPFLNPVDREPLWRFPNELPIAGEPANIVALVEEYMDWLHQSPVPKLLFWGTPGVLIPPAEAARLAKSLPNCKAVDIGPGLNLLQEDNPDLIGSEIARWLSTLEISG

SEQ ID NO: 353 - protein, 180 aa, Synthetic construct
MAEIGTGFPFDPHYVEVLGERMHYVDVGPRDGTPVLFLHGNPTSSYVWRNIIPHVAPTHRCIAPDLIGMGKSDKPDLGYFFDDHVRFMDAFIEALGLEEVVLVIHDWGSALGFHWAKRNPERVKGIAFMEFIRPIPTWDEWPEFARETFQAFRTTDVGRKLIIDQNVFIEGTLPMGVVRP

SEQ ID NO: 354 - protein, 116 aa, Synthetic construct
TEVEMDHYREPFLNPVDREPLWRFPNELPIAGEPANIVALVEEYMDWLHQSPVPKLLFWGTPGVLIPPAEAARLAKSLPNCKAVDIGPGLNLLQEDNPDLIGSEIARWLSTLEISG

SEQ ID NO: 355 - protein, 181 aa, Synthetic construct
MAEIGTGFPFDPHYVEVLGERMHYVDVGPRDGTPVLFLHGNPTSSYVWRNIIPHVAPTHRCIAPDLIGMGKSDKPDLGYFFDDHVRFMDAFIEALGLEEVVLVIHDWGSALGFHWAKRNPERVKGIAFMEFIRPIPTWDEWPEFARETFQAFRTTDVGRKLIIDQNVFIEGTLPMGVVRPL

SEQ ID NO: 356 - protein, 115 aa, Synthetic construct
EVEMDHYREPFLNPVDREPLWRFPNELPIAGEPANIVALVEEYMDWLHQSPVPKLLFWGTPGVLIPPAEAARLAKSLPNCKAVDIGPGLNLLQEDNPDLIGSEIARWLSTLEISG

SEQ ID NO: 357 - protein, 182 aa, Synthetic construct
MAEIGTGFPFDPHYVEVLGERMHYVDVGPRDGTPVLFLHGNPTSSYVWRNIIPHVAPTHRCIAPDLIGMGKSDKPDLGYFFDDHVRFMDAFIEALGLEEVVLVIHDWGSALGFHWAKRNPERVKGIAFMEFIRPIPTWDEWPEFARETFQAFRTTDVGRKLIIDQNVFIEGTLPMGVVRPLT

SEQ ID NO: 358 - protein, 114 aa, Synthetic construct
VEMDHYREPFLNPVDREPLWRFPNELPIAGEPANIVALVEEYMDWLHQSPVPKLLFWGTPGVLIPPAEAARLAKSLPNCKAVDIGPGLNLLQEDNPDLIGSEIARWLSTLEISG

SEQ ID NO: 359 - protein, 183 aa, Synthetic construct
MAEIGTGFPFDPHYVEVLGERMHYVDVGPRDGTPVLFLHGNPTSSYVWRNIIPHVAPTHRCIAPDLIGMGKSDKPDLGYFFDDHVRFMDAFIEALGLEEVVLVIHDWGSALGFHWAKRNPERVKGIAFMEFIRPIPTWDEWPEFARETFQAFRTTDVGRKLIIDQNVFIEGTLPMGVVRPLTE

SEQ ID NO: 360 - protein, 113 aa, Synthetic construct
EMDHYREPFLNPVDREPLWRFPNELPIAGEPANIVALVEEYMDWLHQSPVPKLLFWGTPGVLIPPAEAARLAKSLPNCKAVDIGPGLNLLQEDNPDLIGSEIARWLSTLEISG

SEQ ID NO: 361 - protein, 184 aa, Synthetic construct
MAEIGTGFPFDPHYVEVLGERMHYVDVGPRDGTPVLFLHGNPTSSYVWRNIIPHVAPTHRCIAPDLIGMGKSDKPDLGYFFDDHVRFMDAFIEALGLEEVVLVIHDWGSALGFHWAKRNPERVKGIAFMEFIRPIPTWDEWPEFARETFQAFRTTDVGRKLIIDQNVFIEGTLPMGVVRPLTEV

SEQ ID NO: 362 - protein, 112 aa, Synthetic construct
MDHYREPFLNPVDREPLWRFPNELPIAGEPANIVALVEEYMDWLHQSPVPKLLFWGTPGVLIPPAEAARLAKSLPNCKAVDIGPGLNLLQEDNPDLIGSEIARWLSTLEISG

SEQ ID NO: 363 - protein, 185 aa, Synthetic construct
MAEIGTGFPFDPHYVEVLGERMHYVDVGPRDGTPVLFLHGNPTSSYVWRNIIPHVAPTHRCIAPDLIGMGKSDKPDLGYFFDDHVRFMDAFIEALGLEEVVLVIHDWGSALGFHWAKRNPERVKGIAFMEFIRPIPTWDEWPEFARETFQAFRTTDVGRKLIIDQNVFIEGTLPMGVVRPLTEVE

SEQ ID NO: 364 - protein, 111 aa, Synthetic construct
DHYREPFLNPVDREPLWRFPNELPIAGEPANIVALVEEYMDWLHQSPVPKLLFWGTPGVLIPPAEAARLAKSLPNCKAVDIGPGLNLLQEDNPDLIGSEIARWLSTLEISG

SEQ ID NO: 365 - protein, 186 aa, Synthetic construct
MAEIGTGFPFDPHYVEVLGERMHYVDVGPRDGTPVLFLHGNPTSSYVWRNIIPHVAPTHRCIAPDLIGMGKSDKPDLGYFFDDHVRFMDAFIEALGLEEVVLVIHDWGSALGFHWAKRNPERVKGIAFMEFIRPIPTWDEWPEFARETFQAFRTTDVGRKLIIDQNVFIEGTLPMGVVRPLTEVEM

SEQ ID NO: 366 - protein, 110 aa, Synthetic construct
HYREPFLNPVDREPLWRFPNELPIAGEPANIVALVEEYMDWLHQSPVPKLLFWGTPGVLIPPAEAARLAKSLPNCKAVDIGPGLNLLQEDNPDLIGSEIARWLSTLEISG

SEQ ID NO: 367 - protein, 187 aa, Synthetic construct
MAEIGTGFPFDPHYVEVLGERMHYVDVGPRDGTPVLFLHGNPTSSYVWRNIIPHVAPTHRCIAPDLIGMGKSDKPDLGYFFDDHVRFMDAFIEALGLEEVVLVIHDWGSALGFHWAKRNPERVKGIAFMEFIRPIPTWDEWPEFARETFQAFRTTDVGRKLIIDQNVFIEGTLPMGVVRPLTEVEMD

SEQ ID NO: 368 - protein, 109 aa, Synthetic construct
YREPFLNPVDREPLWRFPNELPIAGEPANIVALVEEYMDWLHQSPVPKLLFWGTPGVLIPPAEAARLAKSLPNCKAVDIGPGLNLLQEDNPDLIGSEIARWLSTLEISG

SEQ ID NO: 369 - protein, 188 aa, Synthetic construct
MAEIGTGFPFDPHYVEVLGERMHYVDVGPRDGTPVLFLHGNPTSSYVWRNIIPHVAPTHRCIAPDLIGMGKSDKPDLGYFFDDHVRFMDAFIEALGLEEVVLVIHDWGSALGFHWAKRNPERVKGIAFMEFIRPIPTWDEWPEFARETFQAFRTTDVGRKLIIDQNVFIEGTLPMGVVRPLTEVEMDH

SEQ ID NO: 370 - protein, 108 aa, Synthetic construct
REPFLNPVDREPLWRFPNELPIAGEPANIVALVEEYMDWLHQSPVPKLLFWGTPGVLIPPAEAARLAKSLPNCKAVDIGPGLNLLQEDNPDLIGSEIARWLSTLEISG

SEQ ID NO: 371 - protein, 189 aa, Synthetic construct
MAEIGTGFPFDPHYVEVLGERMHYVDVGPRDGTPVLFLHGNPTSSYVWRNIIPHVAPTHRCIAPDLIGMGKSDKPDLGYFFDDHVRFMDAFIEALGLEEVVLVIHDWGSALGFHWAKRNPERVKGIAFMEFIRPIPTWDEWPEFARETFQAFRTTDVGRKLIIDQNVFIEGTLPMGVVRPLTEVEMDHY

SEQ ID NO: 372 - protein, 107 aa, Synthetic construct
EPFLNPVDREPLWRFPNELPIAGEPANIVALVEEYMDWLHQSPVPKLLFWGTPGVLIPPAEAARLAKSLPNCKAVDIGPGLNLLQEDNPDLIGSEIARWLSTLEISG

SEQ ID NO: 373 - protein, 190 aa, Synthetic construct
MAEIGTGFPFDPHYVEVLGERMHYVDVGPRDGTPVLFLHGNPTSSYVWRNIIPHVAPTHRCIAPDLIGMGKSDKPDLGYFFDDHVRFMDAFIEALGLEEVVLVIHDWGSALGFHWAKRNPERVKGIAFMEFIRPIPTWDEWPEFARETFQAFRTTDVGRKLIIDQNVFIEGTLPMGVVRPLTEVEMDHYR

SEQ ID NO: 374 - protein, 106 aa, Synthetic construct
PFLNPVDREPLWRFPNELPIAGEPANIVALVEEYMDWLHQSPVPKLLFWGTPGVLIPPAEAARLAKSLPNCKAVDIGPGLNLLQEDNPDLIGSEIARWLSTLEISG

SEQ ID NO: 375 - protein, 191 aa, Synthetic construct
MAEIGTGFPFDPHYVEVLGERMHYVDVGPRDGTPVLFLHGNPTSSYVWRNIIPHVAPTHRCIAPDLIGMGKSDKPDLGYFFDDHVRFMDAFIEALGLEEVVLVIHDWGSALGFHWAKRNPERVKGIAFMEFIRPIPTWDEWPEFARETFQAFRTTDVGRKLIIDQNVFIEGTLPMGVVRPLTEVEMDHYRE

SEQ ID NO: 376 - protein, 105 aa, Synthetic construct
FLNPVDREPLWRFPNELPIAGEPANIVALVEEYMDWLHQSPVPKLLFWGTPGVLIPPAEAARLAKSLPNCKAVDIGPGLNLLQEDNPDLIGSEIARWLSTLEISG

SEQ ID NO: 377 - protein, 192 aa, Synthetic construct
MAEIGTGFPFDPHYVEVLGERMHYVDVGPRDGTPVLFLHGNPTSSYVWRNIIPHVAPTHRCIAPDLIGMGKSDKPDLGYFFDDHVRFMDAFIEALGLEEVVLVIHDWGSALGFHWAKRNPERVKGIAFMEFIRPIPTWDEWPEFARETFQAFRTTDVGRKLIIDQNVFIEGTLPMGVVRPLTEVEMDHYREP

SEQ ID NO: 378 - protein, 104 aa, Synthetic construct
LNPVDREPLWRFPNELPIAGEPANIVALVEEYMDWLHQSPVPKLLFWGTPGVLIPPAEAARLAKSLPNCKAVDIGPGLNLLQEDNPDLIGSEIARWLSTLEISG

SEQ ID NO: 379 - protein, 193 aa, Synthetic construct
MAEIGTGFPFDPHYVEVLGERMHYVDVGPRDGTPVLFLHGNPTSSYVWRNIIPHVAPTHRCIAPDLIGMGKSDKPDLGYFFDDHVRFMDAFIEALGLEEVVLVIHDWGSALGFHWAKRNPERVKGIAFMEFIRPIPTWDEWPEFARETFQAFRTTDVGRKLIIDQNVFIEGTLPMGVVRPLTEVEMDHYREPF

SEQ ID NO: 380 - protein, 103 aa, Synthetic construct
NPVDREPLWRFPNELPIAGEPANIVALVEEYMDWLHQSPVPKLLFWGTPGVLIPPAEAARLAKSLPNCKAVDIGPGLNLLQEDNPDLIGSEIARWLSTLEISG

SEQ ID NO: 381 - protein, 194 aa, Synthetic construct
MAEIGTGFPFDPHYVEVLGERMHYVDVGPRDGTPVLFLHGNPTSSYVWRNIIPHVAPTHRCIAPDLIGMGKSDKPDLGYFFDDHVRFMDAFIEALGLEEVVLVIHDWGSALGFHWAKRNPERVKGIAFMEFIRPIPTWDEWPEFARETFQAFRTTDVGRKLIIDQNVFIEGTLPMGVVRPLTEVEMDHYREPFL

SEQ ID NO: 382 - protein, 102 aa, Synthetic construct
PVDREPLWRFPNELPIAGEPANIVALVEEYMDWLHQSPVPKLLFWGTPGVLIPPAEAARLAKSLPNCKAVDIGPGLNLLQEDNPDLIGSEIARWLSTLEISG

SEQ ID NO: 383 - protein, 195 aa, Synthetic construct
MAEIGTGFPFDPHYVEVLGERMHYVDVGPRDGTPVLFLHGNPTSSYVWRNIIPHVAPTHRCIAPDLIGMGKSDKPDLGYFFDDHVRFMDAFIEALGLEEVVLVIHDWGSALGFHWAKRNPERVKGIAFMEFIRPIPTWDEWPEFARETFQAFRTTDVGRKLIIDQNVFIEGTLPMGVVRPLTEVEMDHYREPFLN

SEQ ID NO: 384 - protein, 101 aa, Synthetic construct
VDREPLWRFPNELPIAGEPANIVALVEEYMDWLHQSPVPKLLFWGTPGVLIPPAEAARLAKSLPNCKAVDIGPGLNLLQEDNPDLIGSEIARWLSTLEISG

SEQ ID NO: 385 - protein, 196 aa, Synthetic construct
MAEIGTGFPFDPHYVEVLGERMHYVDVGPRDGTPVLFLHGNPTSSYVWRNIIPHVAPTHRCIAPDLIGMGKSDKPDLGYFFDDHVRFMDAFIEALGLEEVVLVIHDWGSALGFHWAKRNPERVKGIAFMEFIRPIPTWDEWPEFARETFQAFRTTDVGRKLIIDQNVFIEGTLPMGVVRPLTEVEMDHYREPFLNP

SEQ ID NO: 386 - protein, 100 aa, Synthetic construct
DREPLWRFPNELPIAGEPANIVALVEEYMDWLHQSPVPKLLFWGTPGVLIPPAEAARLAKSLPNCKAVDIGPGLNLLQEDNPDLIGSEIARWLSTLEISG

SEQ ID NO: 387 - protein, 197 aa, Synthetic construct
MAEIGTGFPFDPHYVEVLGERMHYVDVGPRDGTPVLFLHGNPTSSYVWRNIIPHVAPTHRCIAPDLIGMGKSDKPDLGYFFDDHVRFMDAFIEALGLEEVVLVIHDWGSALGFHWAKRNPERVKGIAFMEFIRPIPTWDEWPEFARETFQAFRTTDVGRKLIIDQNVFIEGTLPMGVVRPLTEVEMDHYREPFLNPV

SEQ ID NO: 388 - protein, 99 aa, Synthetic construct
REPLWRFPNELPIAGEPANIVALVEEYMDWLHQSPVPKLLFWGTPGVLIPPAEAARLAKSLPNCKAVDIGPGLNLLQEDNPDLIGSEIARWLSTLEISG

SEQ ID NO: 389 - protein, 198 aa, Synthetic construct
MAEIGTGFPFDPHYVEVLGERMHYVDVGPRDGTPVLFLHGNPTSSYVWRNIIPHVAPTHRCIAPDLIGMGKSDKPDLGYFFDDHVRFMDAFIEALGLEEVVLVIHDWGSALGFHWAKRNPERVKGIAFMEFIRPIPTWDEWPEFARETFQAFRTTDVGRKLIIDQNVFIEGTLPMGVVRPLTEVEMDHYREPFLNPVD

SEQ ID NO: 390 - protein, 98 aa, Synthetic construct
EPLWRFPNELPIAGEPANIVALVEEYMDWLHQSPVPKLLFWGTPGVLIPPAEAARLAKSLPNCKAVDIGPGLNLLQEDNPDLIGSEIARWLSTLEISG

SEQ ID NO: 391 - protein, 199 aa, Synthetic construct
MAEIGTGFPFDPHYVEVLGERMHYVDVGPRDGTPVLFLHGNPTSSYVWRNIIPHVAPTHRCIAPDLIGMGKSDKPDLGYFFDDHVRFMDAFIEALGLEEVVLVIHDWGSALGFHWAKRNPERVKGIAFMEFIRPIPTWDEWPEFARETFQAFRTTDVGRKLIIDQNVFIEGTLPMGVVRPLTEVEMDHYREPFLNPVDR

SEQ ID NO: 392 - protein, 97 aa, Synthetic construct
PLWRFPNELPIAGEPANIVALVEEYMDWLHQSPVPKLLFWGTPGVLIPPAEAARLAKSLPNCKAVDIGPGLNLLQEDNPDLIGSEIARWLSTLEISG

SEQ ID NO: 393 - protein, 200 aa, Synthetic construct
MAEIGTGFPFDPHYVEVLGERMHYVDVGPRDGTPVLFLHGNPTSSYVWRNIIPHVAPTHRCIAPDLIGMGKSDKPDLGYFFDDHVRFMDAFIEALGLEEVVLVIHDWGSALGFHWAKRNPERVKGIAFMEFIRPIPTWDEWPEFARETFQAFRTTDVGRKLIIDQNVFIEGTLPMGVVRPLTEVEMDHYREPFLNPVDRE

SEQ ID NO: 394 - protein, 96 aa, Synthetic construct
LWRFPNELPIAGEPANIVALVEEYMDWLHQSPVPKLLFWGTPGVLIPPAEAARLAKSLPNCKAVDIGPGLNLLQEDNPDLIGSEIARWLSTLEISG

SEQ ID NO: 395 - protein, 201 aa, Synthetic construct
MAEIGTGFPFDPHYVEVLGERMHYVDVGPRDGTPVLFLHGNPTSSYVWRNIIPHVAPTHRCIAPDLIGMGKSDKPDLGYFFDDHVRFMDAFIEALGLEEVVLVIHDWGSALGFHWAKRNPERVKGIAFMEFIRPIPTWDEWPEFARETFQAFRTTDVGRKLIIDQNVFIEGTLPMGVVRPLTEVEMDHYREPFLNPVDREP

SEQ ID NO: 396 - protein, 95 aa, Synthetic construct
WRFPNELPIAGEPANIVALVEEYMDWLHQSPVPKLLFWGTPGVLIPPAEAARLAKSLPNCKAVDIGPGLNLLQEDNPDLIGSEIARWLSTLEISG

SEQ ID NO: 397 - protein, 202 aa, Synthetic construct
MAEIGTGFPFDPHYVEVLGERMHYVDVGPRDGTPVLFLHGNPTSSYVWRNIIPHVAPTHRCIAPDLIGMGKSDKPDLGYFFDDHVRFMDAFIEALGLEEVVLVIHDWGSALGFHWAKRNPERVKGIAFMEFIRPIPTWDEWPEFARETFQAFRTTDVGRKLIIDQNVFIEGTLPMGVVRPLTEVEMDHYREPFLNPVDREPL

SEQ ID NO: 398 - protein, 94 aa, Synthetic construct
RFPNELPIAGEPANIVALVEEYMDWLHQSPVPKLLFWGTPGVLIPPAEAARLAKSLPNCKAVDIGPGLNLLQEDNPDLIGSEIARWLSTLEISG

SEQ ID NO: 399 - protein, 203 aa, Synthetic construct
MAEIGTGFPFDPHYVEVLGERMHYVDVGPRDGTPVLFLHGNPTSSYVWRNIIPHVAPTHRCIAPDLIGMGKSDKPDLGYFFDDHVRFMDAFIEALGLEEVVLVIHDWGSALGFHWAKRNPERVKGIAFMEFIRPIPTWDEWPEFARETFQAFRTTDVGRKLIIDQNVFIEGTLPMGVVRPLTEVEMDHYREPFLNPVDREPLW

SEQ ID NO: 400 - protein, 93 aa, Synthetic construct
FPNELPIAGEPANIVALVEEYMDWLHQSPVPKLLFWGTPGVLIPPAEAARLAKSLPNCKAVDIGPGLNLLQEDNPDLIGSEIARWLSTLEISG

SEQ ID NO: 401 - protein, 204 aa, Synthetic construct
MAEIGTGFPFDPHYVEVLGERMHYVDVGPRDGTPVLFLHGNPTSSYVWRNIIPHVAPTHRCIAPDLIGMGKSDKPDLGYFFDDHVRFMDAFIEALGLEEVVLVIHDWGSALGFHWAKRNPERVKGIAFMEFIRPIPTWDEWPEFARETFQAFRTTDVGRKLIIDQNVFIEGTLPMGVVRPLTEVEMDHYREPFLNPVDREPLWR

SEQ ID NO: 402 - protein, 92 aa, Synthetic construct
PNELPIAGEPANIVALVEEYMDWLHQSPVPKLLFWGTPGVLIPPAEAARLAKSLPNCKAVDIGPGLNLLQEDNPDLIGSEIARWLSTLEISG

SEQ ID NO: 403 - protein, 205 aa, Synthetic construct
MAEIGTGFPFDPHYVEVLGERMHYVDVGPRDGTPVLFLHGNPTSSYVWRNIIPHVAPTHRCIAPDLIGMGKSDKPDLGYFFDDHVRFMDAFIEALGLEEVVLVIHDWGSALGFHWAKRNPERVKGIAFMEFIRPIPTWDEWPEFARETFQAFRTTDVGRKLIIDQNVFIEGTLPMGVVRPLTEVEMDHYREPFLNPVDREPLWRF

SEQ ID NO: 404 - protein, 91 aa, Synthetic construct
NELPIAGEPANIVALVEEYMDWLHQSPVPKLLFWGTPGVLIPPAEAARLAKSLPNCKAVDIGPGLNLLQEDNPDLIGSEIARWLSTLEISG

SEQ ID NO: 405 - protein, 206 aa, Synthetic construct
MAEIGTGFPFDPHYVEVLGERMHYVDVGPRDGTPVLFLHGNPTSSYVWRNIIPHVAPTHRCIAPDLIGMGKSDKPDLGYFFDDHVRFMDAFIEALGLEEVVLVIHDWGSALGFHWAKRNPERVKGIAFMEFIRPIPTWDEWPEFARETFQAFRTTDVGRKLIIDQNVFIEGTLPMGVVRPLTEVEMDHYREPFLNPVDREPLWRFP

SEQ ID NO: 406 - protein, 90 aa, Synthetic construct
ELPIAGEPANIVALVEEYMDWLHQSPVPKLLFWGTPGVLIPPAEAARLAKSLPNCKAVDIGPGLNLLQEDNPDLIGSEIARWLSTLEISG

SEQ ID NO: 407 - protein, 207 aa, Synthetic construct
MAEIGTGFPFDPHYVEVLGERMHYVDVGPRDGTPVLFLHGNPTSSYVWRNIIPHVAPTHRCIAPDLIGMGKSDKPDLGYFFDDHVRFMDAFIEALGLEEVVLVIHDWGSALGFHWAKRNPERVKGIAFMEFIRPIPTWDEWPEFARETFQAFRTTDVGRKLIIDQNVFIEGTLPMGVVRPLTEVEMDHYREPFLNPVDREPLWRFPN

SEQ ID NO: 408 - protein, 89 aa, Synthetic construct
LPIAGEPANIVALVEEYMDWLHQSPVPKLLFWGTPGVLIPPAEAARLAKSLPNCKAVDIGPGLNLLQEDNPDLIGSEIARWLSTLEISG

SEQ ID NO: 409 - protein, 208 aa, Synthetic construct
MAEIGTGFPFDPHYVEVLGERMHYVDVGPRDGTPVLFLHGNPTSSYVWRNIIPHVAPTHRCIAPDLIGMGKSDKPDLGYFFDDHVRFMDAFIEALGLEEVVLVIHDWGSALGFHWAKRNPERVKGIAFMEFIRPIPTWDEWPEFARETFQAFRTTDVGRKLIIDQNVFIEGTLPMGVVRPLTEVEMDHYREPFLNPVDREPLWRFPNE

SEQ ID NO: 410 - protein, 88 aa, Synthetic construct
PIAGEPANIVALVEEYMDWLHQSPVPKLLFWGTPGVLIPPAEAARLAKSLPNCKAVDIGPGLNLLQEDNPDLIGSEIARWLSTLEISG

SEQ ID NO: 411 - protein, 209 aa, Synthetic construct
MAEIGTGFPFDPHYVEVLGERMHYVDVGPRDGTPVLFLHGNPTSSYVWRNIIPHVAPTHRCIAPDLIGMGKSDKPDLGYFFDDHVRFMDAFIEALGLEEVVLVIHDWGSALGFHWAKRNPERVKGIAFMEFIRPIPTWDEWPEFARETFQAFRTTDVGRKLIIDQNVFIEGTLPMGVVRPLTEVEMDHYREPFLNPVDREPLWRFPNEL

SEQ ID NO: 412 - protein, 87 aa, Synthetic construct
IAGEPANIVALVEEYMDWLHQSPVPKLLFWGTPGVLIPPAEAARLAKSLPNCKAVDIGPGLNLLQEDNPDLIGSEIARWLSTLEISG

SEQ ID NO: 413 - protein, 210 aa, Synthetic construct
MAEIGTGFPFDPHYVEVLGERMHYVDVGPRDGTPVLFLHGNPTSSYVWRNIIPHVAPTHRCIAPDLIGMGKSDKPDLGYFFDDHVRFMDAFIEALGLEEVVLVIHDWGSALGFHWAKRNPERVKGIAFMEFIRPIPTWDEWPEFARETFQAFRTTDVGRKLIIDQNVFIEGTLPMGVVRPLTEVEMDHYREPFLNPVDREPLWRFPNELP

SEQ ID NO: 414 - protein, 86 aa, Synthetic construct
AGEPANIVALVEEYMDWLHQSPVPKLLFWGTPGVLIPPAEAARLAKSLPNCKAVDIGPGLNLLQEDNPDLIGSEIARWLSTLEISG

SEQ ID NO: 415 - protein, 211 aa, Synthetic construct
MAEIGTGFPFDPHYVEVLGERMHYVDVGPRDGTPVLFLHGNPTSSYVWRNIIPHVAPTHRCIAPDLIGMGKSDKPDLGYFFDDHVRFMDAFIEALGLEEVVLVIHDWGSALGFHWAKRNPERVKGIAFMEFIRPIPTWDEWPEFARETFQAFRTTDVGRKLIIDQNVFIEGTLPMGVVRPLTEVEMDHYREPFLNPVDREPLWRFPNELPI

SEQ ID NO: 416 - protein, 85 aa, Synthetic construct
GEPANIVALVEEYMDWLHQSPVPKLLFWGTPGVLIPPAEAARLAKSLPNCKAVDIGPGLNLLQEDNPDLIGSEIARWLSTLEISG

SEQ ID NO: 417 - protein, 212 aa, Synthetic construct
MAEIGTGFPFDPHYVEVLGERMHYVDVGPRDGTPVLFLHGNPTSSYVWRNIIPHVAPTHRCIAPDLIGMGKSDKPDLGYFFDDHVRFMDAFIEALGLEEVVLVIHDWGSALGFHWAKRNPERVKGIAFMEFIRPIPTWDEWPEFARETFQAFRTTDVGRKLIIDQNVFIEGTLPMGVVRPLTEVEMDHYREPFLNPVDREPLWRFPNELPIA

SEQ ID NO: 418 - protein, 84 aa, Synthetic construct
EPANIVALVEEYMDWLHQSPVPKLLFWGTPGVLIPPAEAARLAKSLPNCKAVDIGPGLNLLQEDNPDLIGSEIARWLSTLEISG

SEQ ID NO: 419 - protein, 213 aa, Synthetic construct
MAEIGTGFPFDPHYVEVLGERMHYVDVGPRDGTPVLFLHGNPTSSYVWRNIIPHVAPTHRCIAPDLIGMGKSDKPDLGYFFDDHVRFMDAFIEALGLEEVVLVIHDWGSALGFHWAKRNPERVKGIAFMEFIRPIPTWDEWPEFARETFQAFRTTDVGRKLIIDQNVFIEGTLPMGVVRPLTEVEMDHYREPFLNPVDREPLWRFPNELPIAG

SEQ ID NO: 420 - protein, 83 aa, Synthetic construct
PANIVALVEEYMDWLHQSPVPKLLFWGTPGVLIPPAEAARLAKSLPNCKAVDIGPGLNLLQEDNPDLIGSEIARWLSTLEISG

SEQ ID NO: 421 - protein, 214 aa, Synthetic construct
MAEIGTGFPFDPHYVEVLGERMHYVDVGPRDGTPVLFLHGNPTSSYVWRNIIPHVAPTHRCIAPDLIGMGKSDKPDLGYFFDDHVRFMDAFIEALGLEEVVLVIHDWGSALGFHWAKRNPERVKGIAFMEFIRPIPTWDEWPEFARETFQAFRTTDVGRKLIIDQNVFIEGTLPMGVVRPLTEVEMDHYREPFLNPVDREPLWRFPNELPIAGE

SEQ ID NO: 422 - protein, 82 aa, Synthetic construct
ANIVALVEEYMDWLHQSPVPKLLFWGTPGVLIPPAEAARLAKSLPNCKAVDIGPGLNLLQEDNPDLIGSEIARWLSTLEISG

SEQ ID NO: 423 - protein, 215 aa, Synthetic construct
MAEIGTGFPFDPHYVEVLGERMHYVDVGPRDGTPVLFLHGNPTSSYVWRNIIPHVAPTHRCIAPDLIGMGKSDKPDLGYFFDDHVRFMDAFIEALGLEEVVLVIHDWGSALGFHWAKRNPERVKGIAFMEFIRPIPTWDEWPEFARETFQAFRTTDVGRKLIIDQNVFIEGTLPMGVVRPLTEVEMDHYREPFLNPVDREPLWRFPNELPIAGEP

SEQ ID NO: 424 - protein, 81 aa, Synthetic construct
NIVALVEEYMDWLHQSPVPKLLFWGTPGVLIPPAEAARLAKSLPNCKAVDIGPGLNLLQEDNPDLIGSEIARWLSTLEISG

SEQ ID NO: 425 - protein, 216 aa, Synthetic construct
MAEIGTGFPFDPHYVEVLGERMHYVDVGPRDGTPVLFLHGNPTSSYVWRNIIPHVAPTHRCIAPDLIGMGKSDKPDLGYFFDDHVRFMDAFIEALGLEEVVLVIHDWGSALGFHWAKRNPERVKGIAFMEFIRPIPTWDEWPEFARETFQAFRTTDVGRKLIIDQNVFIEGTLPMGVVRPLTEVEMDHYREPFLNPVDREPLWRFPNELPIAGEPA

SEQ ID NO: 426 - protein, 80 aa, Synthetic construct
IVALVEEYMDWLHQSPVPKLLFWGTPGVLIPPAEAARLAKSLPNCKAVDIGPGLNLLQEDNPDLIGSEIARWLSTLEISG

SEQ ID NO: 427 - protein, 217 aa, Synthetic construct
MAEIGTGFPFDPHYVEVLGERMHYVDVGPRDGTPVLFLHGNPTSSYVWRNIIPHVAPTHRCIAPDLIGMGKSDKPDLGYFFDDHVRFMDAFIEALGLEEVVLVIHDWGSALGFHWAKRNPERVKGIAFMEFIRPIPTWDEWPEFARETFQAFRTTDVGRKLIIDQNVFIEGTLPMGVVRPLTEVEMDHYREPFLNPVDREPLWRFPNELPIAGEPAN

SEQ ID NO: 428 - protein, 79 aa, Synthetic construct
VALVEEYMDWLHQSPVPKLLFWGTPGVLIPPAEAARLAKSLPNCKAVDIGPGLNLLQEDNPDLIGSEIARWLSTLEISG

SEQ ID NO: 429 - protein, 218 aa, Synthetic construct
MAEIGTGFPFDPHYVEVLGERMHYVDVGPRDGTPVLFLHGNPTSSYVWRNIIPHVAPTHRCIAPDLIGMGKSDKPDLGYFFDDHVRFMDAFIEALGLEEVVLVIHDWGSALGFHWAKRNPERVKGIAFMEFIRPIPTWDEWPEFARETFQAFRTTDVGRKLIIDQNVFIEGTLPMGVVRPLTEVEMDHYREPFLNPVDREPLWRFPNELPIAGEPANI

SEQ ID NO: 430 - protein, 78 aa, Synthetic construct
ALVEEYMDWLHQSPVPKLLFWGTPGVLIPPAEAARLAKSLPNCKAVDIGPGLNLLQEDNPDLIGSEIARWLSTLEISG

SEQ ID NO: 431 - protein, 219 aa, Synthetic construct
MAEIGTGFPFDPHYVEVLGERMHYVDVGPRDGTPVLFLHGNPTSSYVWRNIIPHVAPTHRCIAPDLIGMGKSDKPDLGYFFDDHVRFMDAFIEALGLEEVVLVIHDWGSALGFHWAKRNPERVKGIAFMEFIRPIPTWDEWPEFARETFQAFRTTDVGRKLIIDQNVFIEGTLPMGVVRPLTEVEMDHYREPFLNPVDREPLWRFPNELPIAGEPANIV

SEQ ID NO: 432 - protein, 77 aa, Synthetic construct
LVEEYMDWLHQSPVPKLLFWGTPGVLIPPAEAARLAKSLPNCKAVDIGPGLNLLQEDNPDLIGSEIARWLSTLEISG

SEQ ID NO: 433 - protein, 220 aa, Synthetic construct
MAEIGTGFPFDPHYVEVLGERMHYVDVGPRDGTPVLFLHGNPTSSYVWRNIIPHVAPTHRCIAPDLIGMGKSDKPDLGYFFDDHVRFMDAFIEALGLEEVVLVIHDWGSALGFHWAKRNPERVKGIAFMEFIRPIPTWDEWPEFARETFQAFRTTDVGRKLIIDQNVFIEGTLPMGVVRPLTEVEMDHYREPFLNPVDREPLWRFPNELPIAGEPANIVA

SEQ ID NO: 434 - protein, 76 aa, Synthetic construct
VEEYMDWLHQSPVPKLLFWGTPGVLIPPAEAARLAKSLPNCKAVDIGPGLNLLQEDNPDLIGSEIARWLSTLEISG

SEQ ID NO: 435 - protein, 221 aa, Synthetic construct
MAEIGTGFPFDPHYVEVLGERMHYVDVGPRDGTPVLFLHGNPTSSYVWRNIIPHVAPTHRCIAPDLIGMGKSDKPDLGYFFDDHVRFMDAFIEALGLEEVVLVIHDWGSALGFHWAKRNPERVKGIAFMEFIRPIPTWDEWPEFARETFQAFRTTDVGRKLIIDQNVFIEGTLPMGVVRPLTEVEMDHYREPFLNPVDREPLWRFPNELPIAGEPANIVAL

SEQ ID NO: 436 - protein, 75 aa, Synthetic construct
EEYMDWLHQSPVPKLLFWGTPGVLIPPAEAARLAKSLPNCKAVDIGPGLNLLQEDNPDLIGSEIARWLSTLEISG

SEQ ID NO: 437 - protein, 222 aa, Synthetic construct
MAEIGTGFPFDPHYVEVLGERMHYVDVGPRDGTPVLFLHGNPTSSYVWRNIIPHVAPTHRCIAPDLIGMGKSDKPDLGYFFDDHVRFMDAFIEALGLEEVVLVIHDWGSALGFHWAKRNPERVKGIAFMEFIRPIPTWDEWPEFARETFQAFRTTDVGRKLIIDQNVFIEGTLPMGVVRPLTEVEMDHYREPFLNPVDREPLWRFPNELPIAGEPANIVALV

SEQ ID NO: 438 - protein, 74 aa, Synthetic construct
EYMDWLHQSPVPKLLFWGTPGVLIPPAEAARLAKSLPNCKAVDIGPGLNLLQEDNPDLIGSEIARWLSTLEISG

SEQ ID NO: 439 - protein, 223 aa, Synthetic construct
MAEIGTGFPFDPHYVEVLGERMHYVDVGPRDGTPVLFLHGNPTSSYVWRNIIPHVAPTHRCIAPDLIGMGKSDKPDLGYFFDDHVRFMDAFIEALGLEEVVLVIHDWGSALGFHWAKRNPERVKGIAFMEFIRPIPTWDEWPEFARETFQAFRTTDVGRKLIIDQNVFIEGTLPMGVVRPLTEVEMDHYREPFLNPVDREPLWRFPNELPIAGEPANIVALVE

SEQ ID NO: 440 - protein, 73 aa, Synthetic construct
YMDWLHQSPVPKLLFWGTPGVLIPPAEAARLAKSLPNCKAVDIGPGLNLLQEDNPDLIGSEIARWLSTLEISG

SEQ ID NO: 441 - protein, 224 aa, Synthetic construct
MAEIGTGFPFDPHYVEVLGERMHYVDVGPRDGTPVLFLHGNPTSSYVWRNIIPHVAPTHRCIAPDLIGMGKSDKPDLGYFFDDHVRFMDAFIEALGLEEVVLVIHDWGSALGFHWAKRNPERVKGIAFMEFIRPIPTWDEWPEFARETFQAFRTTDVGRKLIIDQNVFIEGTLPMGVVRPLTEVEMDHYREPFLNPVDREPLWRFPNELPIAGEPANIVALVEE

SEQ ID NO: 442 - protein, 72 aa, Synthetic construct
MDWLHQSPVPKLLFWGTPGVLIPPAEAARLAKSLPNCKAVDIGPGLNLLQEDNPDLIGSEIARWLSTLEISG

SEQ ID NO: 443 - protein, 225 aa, Synthetic construct
MAEIGTGFPFDPHYVEVLGERMHYVDVGPRDGTPVLFLHGNPTSSYVWRNIIPHVAPTHRCIAPDLIGMGKSDKPDLGYFFDDHVRFMDAFIEALGLEEVVLVIHDWGSALGFHWAKRNPERVKGIAFMEFIRPIPTWDEWPEFARETFQAFRTTDVGRKLIIDQNVFIEGTLPMGVVRPLTEVEMDHYREPFLNPVDREPLWRFPNELPIAGEPANIVALVEEY

SEQ ID NO: 444 - protein, 71 aa, Synthetic construct
DWLHQSPVPKLLFWGTPGVLIPPAEAARLAKSLPNCKAVDIGPGLNLLQEDNPDLIGSEIARWLSTLEISG

SEQ ID NO: 445 - protein, 226 aa, Synthetic construct
MAEIGTGFPFDPHYVEVLGERMHYVDVGPRDGTPVLFLHGNPTSSYVWRNIIPHVAPTHRCIAPDLIGMGKSDKPDLGYFFDDHVRFMDAFIEALGLEEVVLVIHDWGSALGFHWAKRNPERVKGIAFMEFIRPIPTWDEWPEFARETFQAFRTTDVGRKLIIDQNVFIEGTLPMGVVRPLTEVEMDHYREPFLNPVDREPLWRFPNELPIAGEPANIVALVEEYM

SEQ ID NO: 446 - protein, 70 aa, Synthetic construct
WLHQSPVPKLLFWGTPGVLIPPAEAARLAKSLPNCKAVDIGPGLNLLQEDNPDLIGSEIARWLSTLEISG

SEQ ID NO: 447 - protein, 227 aa, Synthetic construct
MAEIGTGFPFDPHYVEVLGERMHYVDVGPRDGTPVLFLHGNPTSSYVWRNIIPHVAPTHRCIAPDLIGMGKSDKPDLGYFFDDHVRFMDAFIEALGLEEVVLVIHDWGSALGFHWAKRNPERVKGIAFMEFIRPIPTWDEWPEFARETFQAFRTTDVGRKLIIDQNVFIEGTLPMGVVRPLTEVEMDHYREPFLNPVDREPLWRFPNELPIAGEPANIVALVEEYMD

SEQ ID NO: 448 - protein, 69 aa, Synthetic construct
LHQSPVPKLLFWGTPGVLIPPAEAARLAKSLPNCKAVDIGPGLNLLQEDNPDLIGSEIARWLSTLEISG

SEQ ID NO: 449 - protein, 228 aa, Synthetic construct
MAEIGTGFPFDPHYVEVLGERMHYVDVGPRDGTPVLFLHGNPTSSYVWRNIIPHVAPTHRCIAPDLIGMGKSDKPDLGYFFDDHVRFMDAFIEALGLEEVVLVIHDWGSALGFHWAKRNPERVKGIAFMEFIRPIPTWDEWPEFARETFQAFRTTDVGRKLIIDQNVFIEGTLPMGVVRPLTEVEMDHYREPFLNPVDREPLWRFPNELPIAGEPANIVALVEEYMDW

SEQ ID NO: 450 - protein, 68 aa, Synthetic construct
HQSPVPKLLFWGTPGVLIPPAEAARLAKSLPNCKAVDIGPGLNLLQEDNPDLIGSEIARWLSTLEISG

SEQ ID NO: 451 - protein, 229 aa, Synthetic construct
MAEIGTGFPFDPHYVEVLGERMHYVDVGPRDGTPVLFLHGNPTSSYVWRNIIPHVAPTHRCIAPDLIGMGKSDKPDLGYFFDDHVRFMDAFIEALGLEEVVLVIHDWGSALGFHWAKRNPERVKGIAFMEFIRPIPTWDEWPEFARETFQAFRTTDVGRKLIIDQNVFIEGTLPMGVVRPLTEVEMDHYREPFLNPVDREPLWRFPNELPIAGEPANIVALVEEYMDWL

SEQ ID NO: 452 - protein, 67 aa, Synthetic construct
QSPVPKLLFWGTPGVLIPPAEAARLAKSLPNCKAVDIGPGLNLLQEDNPDLIGSEIARWLSTLEISG

SEQ ID NO: 453 - protein, 230 aa, Synthetic construct
MAEIGTGFPFDPHYVEVLGERMHYVDVGPRDGTPVLFLHGNPTSSYVWRNIIPHVAPTHRCIAPDLIGMGKSDKPDLGYFFDDHVRFMDAFIEALGLEEVVLVIHDWGSALGFHWAKRNPERVKGIAFMEFIRPIPTWDEWPEFARETFQAFRTTDVGRKLIIDQNVFIEGTLPMGVVRPLTEVEMDHYREPFLNPVDREPLWRFPNELPIAGEPANIVALVEEYMDWLH

SEQ ID NO: 454 - protein, 66 aa, Synthetic construct
SPVPKLLFWGTPGVLIPPAEAARLAKSLPNCKAVDIGPGLNLLQEDNPDLIGSEIARWLSTLEISG

SEQ ID NO: 455 - protein, 231 aa, Synthetic construct
MAEIGTGFPFDPHYVEVLGERMHYVDVGPRDGTPVLFLHGNPTSSYVWRNIIPHVAPTHRCIAPDLIGMGKSDKPDLGYFFDDHVRFMDAFIEALGLEEVVLVIHDWGSALGFHWAKRNPERVKGIAFMEFIRPIPTWDEWPEFARETFQAFRTTDVGRKLIIDQNVFIEGTLPMGVVRPLTEVEMDHYREPFLNPVDREPLWRFPNELPIAGEPANIVALVEEYMDWLHQ

SEQ ID NO: 456 - protein, 65 aa, Synthetic construct
PVPKLLFWGTPGVLIPPAEAARLAKSLPNCKAVDIGPGLNLLQEDNPDLIGSEIARWLSTLEISG

SEQ ID NO: 457 - protein, 232 aa, Synthetic construct
MAEIGTGFPFDPHYVEVLGERMHYVDVGPRDGTPVLFLHGNPTSSYVWRNIIPHVAPTHRCIAPDLIGMGKSDKPDLGYFFDDHVRFMDAFIEALGLEEVVLVIHDWGSALGFHWAKRNPERVKGIAFMEFIRPIPTWDEWPEFARETFQAFRTTDVGRKLIIDQNVFIEGTLPMGVVRPLTEVEMDHYREPFLNPVDREPLWRFPNELPIAGEPANIVALVEEYMDWLHQS

SEQ ID NO: 458 - protein, 64 aa, Synthetic construct
VPKLLFWGTPGVLIPPAEAARLAKSLPNCKAVDIGPGLNLLQEDNPDLIGSEIARWLSTLEISG

SEQ ID NO: 459 - protein, 233 aa, Synthetic construct
MAEIGTGFPFDPHYVEVLGERMHYVDVGPRDGTPVLFLHGNPTSSYVWRNIIPHVAPTHRCIAPDLIGMGKSDKPDLGYFFDDHVRFMDAFIEALGLEEVVLVIHDWGSALGFHWAKRNPERVKGIAFMEFIRPIPTWDEWPEFARETFQAFRTTDVGRKLIIDQNVFIEGTLPMGVVRPLTEVEMDHYREPFLNPVDREPLWRFPNELPIAGEPANIVALVEEYMDWLHQSP

SEQ ID NO: 460 - protein, 63 aa, Synthetic construct
PKLLFWGTPGVLIPPAEAARLAKSLPNCKAVDIGPGLNLLQEDNPDLIGSEIARWLSTLEISG

SEQ ID NO: 461 - protein, 234 aa, Synthetic construct
MAEIGTGFPFDPHYVEVLGERMHYVDVGPRDGTPVLFLHGNPTSSYVWRNIIPHVAPTHRCIAPDLIGMGKSDKPDLGYFFDDHVRFMDAFIEALGLEEVVLVIHDWGSALGFHWAKRNPERVKGIAFMEFIRPIPTWDEWPEFARETFQAFRTTDVGRKLIIDQNVFIEGTLPMGVVRPLTEVEMDHYREPFLNPVDREPLWRFPNELPIAGEPANIVALVEEYMDWLHQSPV

SEQ ID NO: 462 - protein, 62 aa, Synthetic construct
KLLFWGTPGVLIPPAEAARLAKSLPNCKAVDIGPGLNLLQEDNPDLIGSEIARWLSTLEISG

SEQ ID NO: 463 - protein, 235 aa, Synthetic construct
MAEIGTGFPFDPHYVEVLGERMHYVDVGPRDGTPVLFLHGNPTSSYVWRNIIPHVAPTHRCIAPDLIGMGKSDKPDLGYFFDDHVRFMDAFIEALGLEEVVLVIHDWGSALGFHWAKRNPERVKGIAFMEFIRPIPTWDEWPEFARETFQAFRTTDVGRKLIIDQNVFIEGTLPMGVVRPLTEVEMDHYREPFLNPVDREPLWRFPNELPIAGEPANIVALVEEYMDWLHQSPVP

SEQ ID NO: 464 - protein, 61 aa, Synthetic construct
LLFWGTPGVLIPPAEAARLAKSLPNCKAVDIGPGLNLLQEDNPDLIGSEIARWLSTLEISG

SEQ ID NO: 465 - protein, 236 aa, Synthetic construct
MAEIGTGFPFDPHYVEVLGERMHYVDVGPRDGTPVLFLHGNPTSSYVWRNIIPHVAPTHRCIAPDLIGMGKSDKPDLGYFFDDHVRFMDAFIEALGLEEVVLVIHDWGSALGFHWAKRNPERVKGIAFMEFIRPIPTWDEWPEFARETFQAFRTTDVGRKLIIDQNVFIEGTLPMGVVRPLTEVEMDHYREPFLNPVDREPLWRFPNELPIAGEPANIVALVEEYMDWLHQSPVPK

SEQ ID NO: 466 - protein, 60 aa, Synthetic construct
LFWGTPGVLIPPAEAARLAKSLPNCKAVDIGPGLNLLQEDNPDLIGSEIARWLSTLEISG

SEQ ID NO: 467 - protein, 237 aa, Synthetic construct
MAEIGTGFPFDPHYVEVLGERMHYVDVGPRDGTPVLFLHGNPTSSYVWRNIIPHVAPTHRCIAPDLIGMGKSDKPDLGYFFDDHVRFMDAFIEALGLEEVVLVIHDWGSALGFHWAKRNPERVKGIAFMEFIRPIPTWDEWPEFARETFQAFRTTDVGRKLIIDQNVFIEGTLPMGVVRPLTEVEMDHYREPFLNPVDREPLWRFPNELPIAGEPANIVALVEEYMDWLHQSPVPKL

SEQ ID NO: 468 - protein, 59 aa, Synthetic construct
FWGTPGVLIPPAEAARLAKSLPNCKAVDIGPGLNLLQEDNPDLIGSEIARWLSTLEISG

SEQ ID NO: 469 - protein, 238 aa, Synthetic construct
MAEIGTGFPFDPHYVEVLGERMHYVDVGPRDGTPVLFLHGNPTSSYVWRNIIPHVAPTHRCIAPDLIGMGKSDKPDLGYFFDDHVRFMDAFIEALGLEEVVLVIHDWGSALGFHWAKRNPERVKGIAFMEFIRPIPTWDEWPEFARETFQAFRTTDVGRKLIIDQNVFIEGTLPMGVVRPLTEVEMDHYREPFLNPVDREPLWRFPNELPIAGEPANIVALVEEYMDWLHQSPVPKLL

SEQ ID NO: 470 - protein, 58 aa, Synthetic construct
WGTPGVLIPPAEAARLAKSLPNCKAVDIGPGLNLLQEDNPDLIGSEIARWLSTLEISG

SEQ ID NO: 471 - protein, 239 aa, Synthetic construct
MAEIGTGFPFDPHYVEVLGERMHYVDVGPRDGTPVLFLHGNPTSSYVWRNIIPHVAPTHRCIAPDLIGMGKSDKPDLGYFFDDHVRFMDAFIEALGLEEVVLVIHDWGSALGFHWAKRNPERVKGIAFMEFIRPIPTWDEWPEFARETFQAFRTTDVGRKLIIDQNVFIEGTLPMGVVRPLTEVEMDHYREPFLNPVDREPLWRFPNELPIAGEPANIVALVEEYMDWLHQSPVPKLLF

SEQ ID NO: 472 - protein, 57 aa, Synthetic construct
GTPGVLIPPAEAARLAKSLPNCKAVDIGPGLNLLQEDNPDLIGSEIARWLSTLEISG

SEQ ID NO: 473 - protein, 240 aa, Synthetic construct
MAEIGTGFPFDPHYVEVLGERMHYVDVGPRDGTPVLFLHGNPTSSYVWRNIIPHVAPTHRCIAPDLIGMGKSDKPDLGYFFDDHVRFMDAFIEALGLEEVVLVIHDWGSALGFHWAKRNPERVKGIAFMEFIRPIPTWDEWPEFARETFQAFRTTDVGRKLIIDQNVFIEGTLPMGVVRPLTEVEMDHYREPFLNPVDREPLWRFPNELPIAGEPANIVALVEEYMDWLHQSPVPKLLFW

SEQ ID NO: 474 - protein, 56 aa, Synthetic construct
TPGVLIPPAEAARLAKSLPNCKAVDIGPGLNLLQEDNPDLIGSEIARWLSTLEISG

SEQ ID NO: 475 - protein, 241 aa, Synthetic construct
MAEIGTGFPFDPHYVEVLGERMHYVDVGPRDGTPVLFLHGNPTSSYVWRNIIPHVAPTHRCIAPDLIGMGKSDKPDLGYFFDDHVRFMDAFIEALGLEEVVLVIHDWGSALGFHWAKRNPERVKGIAFMEFIRPIPTWDEWPEFARETFQAFRTTDVGRKLIIDQNVFIEGTLPMGVVRPLTEVEMDHYREPFLNPVDREPLWRFPNELPIAGEPANIVALVEEYMDWLHQSPVPKLLFWG

SEQ ID NO: 476 - protein, 55 aa, Synthetic construct
PGVLIPPAEAARLAKSLPNCKAVDIGPGLNLLQEDNPDLIGSEIARWLSTLEISG

SEQ ID NO: 477 - protein, 242 aa, Synthetic construct
MAEIGTGFPFDPHYVEVLGERMHYVDVGPRDGTPVLFLHGNPTSSYVWRNIIPHVAPTHRCIAPDLIGMGKSDKPDLGYFFDDHVRFMDAFIEALGLEEVVLVIHDWGSALGFHWAKRNPERVKGIAFMEFIRPIPTWDEWPEFARETFQAFRTTDVGRKLIIDQNVFIEGTLPMGVVRPLTEVEMDHYREPFLNPVDREPLWRFPNELPIAGEPANIVALVEEYMDWLHQSPVPKLLFWGT

SEQ ID NO: 478 - protein, 54 aa, Synthetic construct
GVLIPPAEAARLAKSLPNCKAVDIGPGLNLLQEDNPDLIGSEIARWLSTLEISG

SEQ ID NO: 479 - protein, 243 aa, Synthetic construct
MAEIGTGFPFDPHYVEVLGERMHYVDVGPRDGTPVLFLHGNPTSSYVWRNIIPHVAPTHRCIAPDLIGMGKSDKPDLGYFFDDHVRFMDAFIEALGLEEVVLVIHDWGSALGFHWAKRNPERVKGIAFMEFIRPIPTWDEWPEFARETFQAFRTTDVGRKLIIDQNVFIEGTLPMGVVRPLTEVEMDHYREPFLNPVDREPLWRFPNELPIAGEPANIVALVEEYMDWLHQSPVPKLLFWGTP

SEQ ID NO: 480 - protein, 53 aa, Synthetic construct
VLIPPAEAARLAKSLPNCKAVDIGPGLNLLQEDNPDLIGSEIARWLSTLEISG

SEQ ID NO: 481 - protein, 244 aa, Synthetic construct
MAEIGTGFPFDPHYVEVLGERMHYVDVGPRDGTPVLFLHGNPTSSYVWRNIIPHVAPTHRCIAPDLIGMGKSDKPDLGYFFDDHVRFMDAFIEALGLEEVVLVIHDWGSALGFHWAKRNPERVKGIAFMEFIRPIPTWDEWPEFARETFQAFRTTDVGRKLIIDQNVFIEGTLPMGVVRPLTEVEMDHYREPFLNPVDREPLWRFPNELPIAGEPANIVALVEEYMDWLHQSPVPKLLFWGTPG

SEQ ID NO: 482 - protein, 52 aa, Synthetic construct
LIPPAEAARLAKSLPNCKAVDIGPGLNLLQEDNPDLIGSEIARWLSTLEISG

SEQ ID NO: 483 - protein, 245 aa, Synthetic construct
MAEIGTGFPFDPHYVEVLGERMHYVDVGPRDGTPVLFLHGNPTSSYVWRNIIPHVAPTHRCIAPDLIGMGKSDKPDLGYFFDDHVRFMDAFIEALGLEEVVLVIHDWGSALGFHWAKRNPERVKGIAFMEFIRPIPTWDEWPEFARETFQAFRTTDVGRKLIIDQNVFIEGTLPMGVVRPLTEVEMDHYREPFLNPVDREPLWRFPNELPIAGEPANIVALVEEYMDWLHQSPVPKLLFWGTPGV

SEQ ID NO: 484 - protein, 51 aa, Synthetic construct
IPPAEAARLAKSLPNCKAVDIGPGLNLLQEDNPDLIGSEIARWLSTLEISG

SEQ ID NO: 485 - protein, 246 aa, Synthetic construct
MAEIGTGFPFDPHYVEVLGERMHYVDVGPRDGTPVLFLHGNPTSSYVWRNIIPHVAPTHRCIAPDLIGMGKSDKPDLGYFFDDHVRFMDAFIEALGLEEVVLVIHDWGSALGFHWAKRNPERVKGIAFMEFIRPIPTWDEWPEFARETFQAFRTTDVGRKLIIDQNVFIEGTLPMGVVRPLTEVEMDHYREPFLNPVDREPLWRFPNELPIAGEPANIVALVEEYMDWLHQSPVPKLLFWGTPGVL

SEQ ID NO: 486 - protein, 50 aa, Synthetic construct
PPAEAARLAKSLPNCKAVDIGPGLNLLQEDNPDLIGSEIARWLSTLEISG

SEQ ID NO: 487 - protein, 247 aa, Synthetic construct
MAEIGTGFPFDPHYVEVLGERMHYVDVGPRDGTPVLFLHGNPTSSYVWRNIIPHVAPTHRCIAPDLIGMGKSDKPDLGYFFDDHVRFMDAFIEALGLEEVVLVIHDWGSALGFHWAKRNPERVKGIAFMEFIRPIPTWDEWPEFARETFQAFRTTDVGRKLIIDQNVFIEGTLPMGVVRPLTEVEMDHYREPFLNPVDREPLWRFPNELPIAGEPANIVALVEEYMDWLHQSPVPKLLFWGTPGVLI

SEQ ID NO: 488 - protein, 49 aa, Synthetic construct
PAEAARLAKSLPNCKAVDIGPGLNLLQEDNPDLIGSEIARWLSTLEISG

SEQ ID NO: 489 - protein, 248 aa, Synthetic construct
MAEIGTGFPFDPHYVEVLGERMHYVDVGPRDGTPVLFLHGNPTSSYVWRNIIPHVAPTHRCIAPDLIGMGKSDKPDLGYFFDDHVRFMDAFIEALGLEEVVLVIHDWGSALGFHWAKRNPERVKGIAFMEFIRPIPTWDEWPEFARETFQAFRTTDVGRKLIIDQNVFIEGTLPMGVVRPLTEVEMDHYREPFLNPVDREPLWRFPNELPIAGEPANIVALVEEYMDWLHQSPVPKLLFWGTPGVLIP

SEQ ID NO: 490 - protein, 48 aa, Synthetic construct
AEAARLAKSLPNCKAVDIGPGLNLLQEDNPDLIGSEIARWLSTLEISG

SEQ ID NO: 491 - protein, 249 aa, Synthetic construct
MAEIGTGFPFDPHYVEVLGERMHYVDVGPRDGTPVLFLHGNPTSSYVWRNIIPHVAPTHRCIAPDLIGMGKSDKPDLGYFFDDHVRFMDAFIEALGLEEVVLVIHDWGSALGFHWAKRNPERVKGIAFMEFIRPIPTWDEWPEFARETFQAFRTTDVGRKLIIDQNVFIEGTLPMGVVRPLTEVEMDHYREPFLNPVDREPLWRFPNELPIAGEPANIVALVEEYMDWLHQSPVPKLLFWGTPGVLIPP

SEQ ID NO: 492 - protein, 47 aa, Synthetic construct
EAARLAKSLPNCKAVDIGPGLNLLQEDNPDLIGSEIARWLSTLEISG

SEQ ID NO: 493 - protein, 250 aa, Synthetic construct
MAEIGTGFPFDPHYVEVLGERMHYVDVGPRDGTPVLFLHGNPTSSYVWRNIIPHVAPTHRCIAPDLIGMGKSDKPDLGYFFDDHVRFMDAFIEALGLEEVVLVIHDWGSALGFHWAKRNPERVKGIAFMEFIRPIPTWDEWPEFARETFQAFRTTDVGRKLIIDQNVFIEGTLPMGVVRPLTEVEMDHYREPFLNPVDREPLWRFPNELPIAGEPANIVALVEEYMDWLHQSPVPKLLFWGTPGVLIPPA

SEQ ID NO: 494 - protein, 46 aa, Synthetic construct
AARLAKSLPNCKAVDIGPGLNLLQEDNPDLIGSEIARWLSTLEISG

SEQ ID NO: 495 - protein, 251 aa, Synthetic construct
MAEIGTGFPFDPHYVEVLGERMHYVDVGPRDGTPVLFLHGNPTSSYVWRNIIPHVAPTHRCIAPDLIGMGKSDKPDLGYFFDDHVRFMDAFIEALGLEEVVLVIHDWGSALGFHWAKRNPERVKGIAFMEFIRPIPTWDEWPEFARETFQAFRTTDVGRKLIIDQNVFIEGTLPMGVVRPLTEVEMDHYREPFLNPVDREPLWRFPNELPIAGEPANIVALVEEYMDWLHQSPVPKLLFWGTPGVLIPPAE

SEQ ID NO: 496 - protein, 45 aa, Synthetic construct
ARLAKSLPNCKAVDIGPGLNLLQEDNPDLIGSEIARWLSTLEISG

SEQ ID NO: 497 - protein, 252 aa, Synthetic construct
MAEIGTGFPFDPHYVEVLGERMHYVDVGPRDGTPVLFLHGNPTSSYVWRNIIPHVAPTHRCIAPDLIGMGKSDKPDLGYFFDDHVRFMDAFIEALGLEEVVLVIHDWGSALGFHWAKRNPERVKGIAFMEFIRPIPTWDEWPEFARETFQAFRTTDVGRKLIIDQNVFIEGTLPMGVVRPLTEVEMDHYREPFLNPVDREPLWRFPNELPIAGEPANIVALVEEYMDWLHQSPVPKLLFWGTPGVLIPPAEA

SEQ ID NO: 498 - protein, 44 aa, Synthetic construct
RLAKSLPNCKAVDIGPGLNLLQEDNPDLIGSEIARWLSTLEISG

SEQ ID NO: 499 - protein, 253 aa, Synthetic construct
MAEIGTGFPFDPHYVEVLGERMHYVDVGPRDGTPVLFLHGNPTSSYVWRNIIPHVAPTHRCIAPDLIGMGKSDKPDLGYFFDDHVRFMDAFIEALGLEEVVLVIHDWGSALGFHWAKRNPERVKGIAFMEFIRPIPTWDEWPEFARETFQAFRTTDVGRKLIIDQNVFIEGTLPMGVVRPLTEVEMDHYREPFLNPVDREPLWRFPNELPIAGEPANIVALVEEYMDWLHQSPVPKLLFWGTPGVLIPPAEAA

SEQ ID NO: 500 - protein, 43 aa, Synthetic construct
LAKSLPNCKAVDIGPGLNLLQEDNPDLIGSEIARWLSTLEISG

SEQ ID NO: 501 - protein, 254 aa, Synthetic construct
MAEIGTGFPFDPHYVEVLGERMHYVDVGPRDGTPVLFLHGNPTSSYVWRNIIPHVAPTHRCIAPDLIGMGKSDKPDLGYFFDDHVRFMDAFIEALGLEEVVLVIHDWGSALGFHWAKRNPERVKGIAFMEFIRPIPTWDEWPEFARETFQAFRTTDVGRKLIIDQNVFIEGTLPMGVVRPLTEVEMDHYREPFLNPVDREPLWRFPNELPIAGEPANIVALVEEYMDWLHQSPVPKLLFWGTPGVLIPPAEAAR

SEQ ID NO: 502 - protein, 42 aa, Synthetic construct
AKSLPNCKAVDIGPGLNLLQEDNPDLIGSEIARWLSTLEISG

SEQ ID NO: 503 - protein, 255 aa, Synthetic construct
MAEIGTGFPFDPHYVEVLGERMHYVDVGPRDGTPVLFLHGNPTSSYVWRNIIPHVAPTHRCIAPDLIGMGKSDKPDLGYFFDDHVRFMDAFIEALGLEEVVLVIHDWGSALGFHWAKRNPERVKGIAFMEFIRPIPTWDEWPEFARETFQAFRTTDVGRKLIIDQNVFIEGTLPMGVVRPLTEVEMDHYREPFLNPVDREPLWRFPNELPIAGEPANIVALVEEYMDWLHQSPVPKLLFWGTPGVLIPPAEAARL

SEQ ID NO: 504 - protein, 41 aa, Synthetic construct
KSLPNCKAVDIGPGLNLLQEDNPDLIGSEIARWLSTLEISG

SEQ ID NO: 505 - protein, 256 aa, Synthetic construct
MAEIGTGFPFDPHYVEVLGERMHYVDVGPRDGTPVLFLHGNPTSSYVWRNIIPHVAPTHRCIAPDLIGMGKSDKPDLGYFFDDHVRFMDAFIEALGLEEVVLVIHDWGSALGFHWAKRNPERVKGIAFMEFIRPIPTWDEWPEFARETFQAFRTTDVGRKLIIDQNVFIEGTLPMGVVRPLTEVEMDHYREPFLNPVDREPLWRFPNELPIAGEPANIVALVEEYMDWLHQSPVPKLLFWGTPGVLIPPAEAARLA

SEQ ID NO: 506 - protein, 40 aa, Synthetic construct
SLPNCKAVDIGPGLNLLQEDNPDLIGSEIARWLSTLEISG

SEQ ID NO: 507 - protein, 257 aa, Synthetic construct
MAEIGTGFPFDPHYVEVLGERMHYVDVGPRDGTPVLFLHGNPTSSYVWRNIIPHVAPTHRCIAPDLIGMGKSDKPDLGYFFDDHVRFMDAFIEALGLEEVVLVIHDWGSALGFHWAKRNPERVKGIAFMEFIRPIPTWDEWPEFARETFQAFRTTDVGRKLIIDQNVFIEGTLPMGVVRPLTEVEMDHYREPFLNPVDREPLWRFPNELPIAGEPANIVALVEEYMDWLHQSPVPKLLFWGTPGVLIPPAEAARLAK

SEQ ID NO: 508 - protein, 39 aa, Synthetic construct
LPNCKAVDIGPGLNLLQEDNPDLIGSEIARWLSTLEISG

SEQ ID NO: 509 - protein, 258 aa, Synthetic construct
MAEIGTGFPFDPHYVEVLGERMHYVDVGPRDGTPVLFLHGNPTSSYVWRNIIPHVAPTHRCIAPDLIGMGKSDKPDLGYFFDDHVRFMDAFIEALGLEEVVLVIHDWGSALGFHWAKRNPERVKGIAFMEFIRPIPTWDEWPEFARETFQAFRTTDVGRKLIIDQNVFIEGTLPMGVVRPLTEVEMDHYREPFLNPVDREPLWRFPNELPIAGEPANIVALVEEYMDWLHQSPVPKLLFWGTPGVLIPPAEAARLAKS

SEQ ID NO: 510 - protein, 38 aa, Synthetic construct
PNCKAVDIGPGLNLLQEDNPDLIGSEIARWLSTLEISG

SEQ ID NO: 511 - protein, 259 aa, Synthetic construct
MAEIGTGFPFDPHYVEVLGERMHYVDVGPRDGTPVLFLHGNPTSSYVWRNIIPHVAPTHRCIAPDLIGMGKSDKPDLGYFFDDHVRFMDAFIEALGLEEVVLVIHDWGSALGFHWAKRNPERVKGIAFMEFIRPIPTWDEWPEFARETFQAFRTTDVGRKLIIDQNVFIEGTLPMGVVRPLTEVEMDHYREPFLNPVDREPLWRFPNELPIAGEPANIVALVEEYMDWLHQSPVPKLLFWGTPGVLIPPAEAARLAKSL

SEQ ID NO: 512 - protein, 37 aa, Synthetic construct
NCKAVDIGPGLNLLQEDNPDLIGSEIARWLSTLEISG

SEQ ID NO: 513 - protein, 260 aa, Synthetic construct
MAEIGTGFPFDPHYVEVLGERMHYVDVGPRDGTPVLFLHGNPTSSYVWRNIIPHVAPTHRCIAPDLIGMGKSDKPDLGYFFDDHVRFMDAFIEALGLEEVVLVIHDWGSALGFHWAKRNPERVKGIAFMEFIRPIPTWDEWPEFARETFQAFRTTDVGRKLIIDQNVFIEGTLPMGVVRPLTEVEMDHYREPFLNPVDREPLWRFPNELPIAGEPANIVALVEEYMDWLHQSPVPKLLFWGTPGVLIPPAEAARLAKSLP

SEQ ID NO: 514 - protein, 36 aa, Synthetic construct
CKAVDIGPGLNLLQEDNPDLIGSEIARWLSTLEISG

SEQ ID NO: 515 - protein, 261 aa, Synthetic construct
MAEIGTGFPFDPHYVEVLGERMHYVDVGPRDGTPVLFLHGNPTSSYVWRNIIPHVAPTHRCIAPDLIGMGKSDKPDLGYFFDDHVRFMDAFIEALGLEEVVLVIHDWGSALGFHWAKRNPERVKGIAFMEFIRPIPTWDEWPEFARETFQAFRTTDVGRKLIIDQNVFIEGTLPMGVVRPLTEVEMDHYREPFLNPVDREPLWRFPNELPIAGEPANIVALVEEYMDWLHQSPVPKLLFWGTPGVLIPPAEAARLAKSLPN

SEQ ID NO: 516 - protein, 35 aa, Synthetic construct
KAVDIGPGLNLLQEDNPDLIGSEIARWLSTLEISG

SEQ ID NO: 517 - protein, 262 aa, Synthetic construct
MAEIGTGFPFDPHYVEVLGERMHYVDVGPRDGTPVLFLHGNPTSSYVWRNIIPHVAPTHRCIAPDLIGMGKSDKPDLGYFFDDHVRFMDAFIEALGLEEVVLVIHDWGSALGFHWAKRNPERVKGIAFMEFIRPIPTWDEWPEFARETFQAFRTTDVGRKLIIDQNVFIEGTLPMGVVRPLTEVEMDHYREPFLNPVDREPLWRFPNELPIAGEPANIVALVEEYMDWLHQSPVPKLLFWGTPGVLIPPAEAARLAKSLPNC

SEQ ID NO: 518 - protein, 34 aa, Synthetic construct
AVDIGPGLNLLQEDNPDLIGSEIARWLSTLEISG

SEQ ID NO: 519 - protein, 263 aa, Synthetic construct
MAEIGTGFPFDPHYVEVLGERMHYVDVGPRDGTPVLFLHGNPTSSYVWRNIIPHVAPTHRCIAPDLIGMGKSDKPDLGYFFDDHVRFMDAFIEALGLEEVVLVIHDWGSALGFHWAKRNPERVKGIAFMEFIRPIPTWDEWPEFARETFQAFRTTDVGRKLIIDQNVFIEGTLPMGVVRPLTEVEMDHYREPFLNPVDREPLWRFPNELPIAGEPANIVALVEEYMDWLHQSPVPKLLFWGTPGVLIPPAEAARLAKSLPNCK

SEQ ID NO: 520 - protein, 33 aa, Synthetic construct
VDIGPGLNLLQEDNPDLIGSEIARWLSTLEISG

SEQ ID NO: 521 - protein, 264 aa, Synthetic construct
MAEIGTGFPFDPHYVEVLGERMHYVDVGPRDGTPVLFLHGNPTSSYVWRNIIPHVAPTHRCIAPDLIGMGKSDKPDLGYFFDDHVRFMDAFIEALGLEEVVLVIHDWGSALGFHWAKRNPERVKGIAFMEFIRPIPTWDEWPEFARETFQAFRTTDVGRKLIIDQNVFIEGTLPMGVVRPLTEVEMDHYREPFLNPVDREPLWRFPNELPIAGEPANIVALVEEYMDWLHQSPVPKLLFWGTPGVLIPPAEAARLAKSLPNCKA

SEQ ID NO: 522 - protein, 32 aa, Synthetic construct
DIGPGLNLLQEDNPDLIGSEIARWLSTLEISG

SEQ ID NO: 523 - protein, 265 aa, Synthetic construct
MAEIGTGFPFDPHYVEVLGERMHYVDVGPRDGTPVLFLHGNPTSSYVWRNIIPHVAPTHRCIAPDLIGMGKSDKPDLGYFFDDHVRFMDAFIEALGLEEVVLVIHDWGSALGFHWAKRNPERVKGIAFMEFIRPIPTWDEWPEFARETFQAFRTTDVGRKLIIDQNVFIEGTLPMGVVRPLTEVEMDHYREPFLNPVDREPLWRFPNELPIAGEPANIVALVEEYMDWLHQSPVPKLLFWGTPGVLIPPAEAARLAKSLPNCKAV

SEQ ID NO: 524 - protein, 31 aa, Synthetic construct
IGPGLNLLQEDNPDLIGSEIARWLSTLEISG

SEQ ID NO: 525 - protein, 266 aa, Synthetic construct
MAEIGTGFPFDPHYVEVLGERMHYVDVGPRDGTPVLFLHGNPTSSYVWRNIIPHVAPTHRCIAPDLIGMGKSDKPDLGYFFDDHVRFMDAFIEALGLEEVVLVIHDWGSALGFHWAKRNPERVKGIAFMEFIRPIPTWDEWPEFARETFQAFRTTDVGRKLIIDQNVFIEGTLPMGVVRPLTEVEMDHYREPFLNPVDREPLWRFPNELPIAGEPANIVALVEEYMDWLHQSPVPKLLFWGTPGVLIPPAEAARLAKSLPNCKAVD

SEQ ID NO: 526 - protein, 30 aa, Synthetic construct
GPGLNLLQEDNPDLIGSEIARWLSTLEISG

SEQ ID NO: 527 - protein, 267 aa, Synthetic construct
MAEIGTGFPFDPHYVEVLGERMHYVDVGPRDGTPVLFLHGNPTSSYVWRNIIPHVAPTHRCIAPDLIGMGKSDKPDLGYFFDDHVRFMDAFIEALGLEEVVLVIHDWGSALGFHWAKRNPERVKGIAFMEFIRPIPTWDEWPEFARETFQAFRTTDVGRKLIIDQNVFIEGTLPMGVVRPLTEVEMDHYREPFLNPVDREPLWRFPNELPIAGEPANIVALVEEYMDWLHQSPVPKLLFWGTPGVLIPPAEAARLAKSLPNCKAVDI

SEQ ID NO: 528 - protein, 29 aa, Synthetic construct
PGLNLLQEDNPDLIGSEIARWLSTLEISG

SEQ ID NO: 529 - protein, 268 aa, Synthetic construct
MAEIGTGFPFDPHYVEVLGERMHYVDVGPRDGTPVLFLHGNPTSSYVWRNIIPHVAPTHRCIAPDLIGMGKSDKPDLGYFFDDHVRFMDAFIEALGLEEVVLVIHDWGSALGFHWAKRNPERVKGIAFMEFIRPIPTWDEWPEFARETFQAFRTTDVGRKLIIDQNVFIEGTLPMGVVRPLTEVEMDHYREPFLNPVDREPLWRFPNELPIAGEPANIVALVEEYMDWLHQSPVPKLLFWGTPGVLIPPAEAARLAKSLPNCKAVDIG

SEQ ID NO: 530 - protein, 28 aa, Synthetic construct
GLNLLQEDNPDLIGSEIARWLSTLEISG

SEQ ID NO: 531 - protein, 269 aa, Synthetic construct
MAEIGTGFPFDPHYVEVLGERMHYVDVGPRDGTPVLFLHGNPTSSYVWRNIIPHVAPTHRCIAPDLIGMGKSDKPDLGYFFDDHVRFMDAFIEALGLEEVVLVIHDWGSALGFHWAKRNPERVKGIAFMEFIRPIPTWDEWPEFARETFQAFRTTDVGRKLIIDQNVFIEGTLPMGVVRPLTEVEMDHYREPFLNPVDREPLWRFPNELPIAGEPANIVALVEEYMDWLHQSPVPKLLFWGTPGVLIPPAEAARLAKSLPNCKAVDIGP

SEQ ID NO: 532 - protein, 27 aa, Synthetic construct
LNLLQEDNPDLIGSEIARWLSTLEISG

SEQ ID NO: 533 - protein, 270 aa, Synthetic construct
MAEIGTGFPFDPHYVEVLGERMHYVDVGPRDGTPVLFLHGNPTSSYVWRNIIPHVAPTHRCIAPDLIGMGKSDKPDLGYFFDDHVRFMDAFIEALGLEEVVLVIHDWGSALGFHWAKRNPERVKGIAFMEFIRPIPTWDEWPEFARETFQAFRTTDVGRKLIIDQNVFIEGTLPMGVVRPLTEVEMDHYREPFLNPVDREPLWRFPNELPIAGEPANIVALVEEYMDWLHQSPVPKLLFWGTPGVLIPPAEAARLAKSLPNCKAVDIGPG

SEQ ID NO: 534 - protein, 26 aa, Synthetic construct
NLLQEDNPDLIGSEIARWLSTLEISG

SEQ ID NO: 535 - protein, 271 aa, Synthetic construct
MAEIGTGFPFDPHYVEVLGERMHYVDVGPRDGTPVLFLHGNPTSSYVWRNIIPHVAPTHRCIAPDLIGMGKSDKPDLGYFFDDHVRFMDAFIEALGLEEVVLVIHDWGSALGFHWAKRNPERVKGIAFMEFIRPIPTWDEWPEFARETFQAFRTTDVGRKLIIDQNVFIEGTLPMGVVRPLTEVEMDHYREPFLNPVDREPLWRFPNELPIAGEPANIVALVEEYMDWLHQSPVPKLLFWGTPGVLIPPAEAARLAKSLPNCKAVDIGPGL

SEQ ID NO: 536 - protein, 25 aa, Synthetic construct
LLQEDNPDLIGSEIARWLSTLEISG

SEQ ID NO: 537 - protein, 272 aa, Synthetic construct
MAEIGTGFPFDPHYVEVLGERMHYVDVGPRDGTPVLFLHGNPTSSYVWRNIIPHVAPTHRCIAPDLIGMGKSDKPDLGYFFDDHVRFMDAFIEALGLEEVVLVIHDWGSALGFHWAKRNPERVKGIAFMEFIRPIPTWDEWPEFARETFQAFRTTDVGRKLIIDQNVFIEGTLPMGVVRPLTEVEMDHYREPFLNPVDREPLWRFPNELPIAGEPANIVALVEEYMDWLHQSPVPKLLFWGTPGVLIPPAEAARLAKSLPNCKAVDIGPGLN

SEQ ID NO: 538 - protein, 24 aa, Synthetic construct
LQEDNPDLIGSEIARWLSTLEISG

SEQ ID NO: 539 - protein, 273 aa, Synthetic construct
MAEIGTGFPFDPHYVEVLGERMHYVDVGPRDGTPVLFLHGNPTSSYVWRNIIPHVAPTHRCIAPDLIGMGKSDKPDLGYFFDDHVRFMDAFIEALGLEEVVLVIHDWGSALGFHWAKRNPERVKGIAFMEFIRPIPTWDEWPEFARETFQAFRTTDVGRKLIIDQNVFIEGTLPMGVVRPLTEVEMDHYREPFLNPVDREPLWRFPNELPIAGEPANIVALVEEYMDWLHQSPVPKLLFWGTPGVLIPPAEAARLAKSLPNCKAVDIGPGLNL

SEQ ID NO: 540 - protein, 23 aa, Synthetic construct
QEDNPDLIGSEIARWLSTLEISG

SEQ ID NO: 541 - protein, 274 aa, Synthetic construct
MAEIGTGFPFDPHYVEVLGERMHYVDVGPRDGTPVLFLHGNPTSSYVWRNIIPHVAPTHRCIAPDLIGMGKSDKPDLGYFFDDHVRFMDAFIEALGLEEVVLVIHDWGSALGFHWAKRNPERVKGIAFMEFIRPIPTWDEWPEFARETFQAFRTTDVGRKLIIDQNVFIEGTLPMGVVRPLTEVEMDHYREPFLNPVDREPLWRFPNELPIAGEPANIVALVEEYMDWLHQSPVPKLLFWGTPGVLIPPAEAARLAKSLPNCKAVDIGPGLNLL

SEQ ID NO: 542 - protein, 22 aa, Synthetic construct
EDNPDLIGSEIARWLSTLEISG

SEQ ID NO: 543 - protein, 275 aa, Synthetic construct
MAEIGTGFPFDPHYVEVLGERMHYVDVGPRDGTPVLFLHGNPTSSYVWRNIIPHVAPTHRCIAPDLIGMGKSDKPDLGYFFDDHVRFMDAFIEALGLEEVVLVIHDWGSALGFHWAKRNPERVKGIAFMEFIRPIPTWDEWPEFARETFQAFRTTDVGRKLIIDQNVFIEGTLPMGVVRPLTEVEMDHYREPFLNPVDREPLWRFPNELPIAGEPANIVALVEEYMDWLHQSPVPKLLFWGTPGVLIPPAEAARLAKSLPNCKAVDIGPGLNLLQ

SEQ ID NO: 544 - protein, 21 aa, Synthetic construct
DNPDLIGSEIARWLSTLEISG

SEQ ID NO: 545 - protein, 276 aa, Synthetic construct
MAEIGTGFPFDPHYVEVLGERMHYVDVGPRDGTPVLFLHGNPTSSYVWRNIIPHVAPTHRCIAPDLIGMGKSDKPDLGYFFDDHVRFMDAFIEALGLEEVVLVIHDWGSALGFHWAKRNPERVKGIAFMEFIRPIPTWDEWPEFARETFQAFRTTDVGRKLIIDQNVFIEGTLPMGVVRPLTEVEMDHYREPFLNPVDREPLWRFPNELPIAGEPANIVALVEEYMDWLHQSPVPKLLFWGTPGVLIPPAEAARLAKSLPNCKAVDIGPGLNLLQE

SEQ ID NO: 546 - protein, 20 aa, Synthetic construct
NPDLIGSEIARWLSTLEISG

SEQ ID NO: 547 - protein, 277 aa, Synthetic construct
MAEIGTGFPFDPHYVEVLGERMHYVDVGPRDGTPVLFLHGNPTSSYVWRNIIPHVAPTHRCIAPDLIGMGKSDKPDLGYFFDDHVRFMDAFIEALGLEEVVLVIHDWGSALGFHWAKRNPERVKGIAFMEFIRPIPTWDEWPEFARETFQAFRTTDVGRKLIIDQNVFIEGTLPMGVVRPLTEVEMDHYREPFLNPVDREPLWRFPNELPIAGEPANIVALVEEYMDWLHQSPVPKLLFWGTPGVLIPPAEAARLAKSLPNCKAVDIGPGLNLLQED

SEQ ID NO: 548 - protein, 19 aa, Synthetic construct
PDLIGSEIARWLSTLEISG

SEQ ID NO: 549 - protein, 278 aa, Synthetic construct
MAEIGTGFPFDPHYVEVLGERMHYVDVGPRDGTPVLFLHGNPTSSYVWRNIIPHVAPTHRCIAPDLIGMGKSDKPDLGYFFDDHVRFMDAFIEALGLEEVVLVIHDWGSALGFHWAKRNPERVKGIAFMEFIRPIPTWDEWPEFARETFQAFRTTDVGRKLIIDQNVFIEGTLPMGVVRPLTEVEMDHYREPFLNPVDREPLWRFPNELPIAGEPANIVALVEEYMDWLHQSPVPKLLFWGTPGVLIPPAEAARLAKSLPNCKAVDIGPGLNLLQEDN

SEQ ID NO: 550 - protein, 18 aa, Synthetic construct
DLIGSEIARWLSTLEISG

SEQ ID NO: 551 - protein, 279 aa, Synthetic construct
MAEIGTGFPFDPHYVEVLGERMHYVDVGPRDGTPVLFLHGNPTSSYVWRNIIPHVAPTHRCIAPDLIGMGKSDKPDLGYFFDDHVRFMDAFIEALGLEEVVLVIHDWGSALGFHWAKRNPERVKGIAFMEFIRPIPTWDEWPEFARETFQAFRTTDVGRKLIIDQNVFIEGTLPMGVVRPLTEVEMDHYREPFLNPVDREPLWRFPNELPIAGEPANIVALVEEYMDWLHQSPVPKLLFWGTPGVLIPPAEAARLAKSLPNCKAVDIGPGLNLLQEDNP

SEQ ID NO: 552 - protein, 17 aa, Synthetic construct
LIGSEIARWLSTLEISG

SEQ ID NO: 553 - protein, 280 aa, Synthetic construct
MAEIGTGFPFDPHYVEVLGERMHYVDVGPRDGTPVLFLHGNPTSSYVWRNIIPHVAPTHRCIAPDLIGMGKSDKPDLGYFFDDHVRFMDAFIEALGLEEVVLVIHDWGSALGFHWAKRNPERVKGIAFMEFIRPIPTWDEWPEFARETFQAFRTTDVGRKLIIDQNVFIEGTLPMGVVRPLTEVEMDHYREPFLNPVDREPLWRFPNELPIAGEPANIVALVEEYMDWLHQSPVPKLLFWGTPGVLIPPAEAARLAKSLPNCKAVDIGPGLNLLQEDNPD

SEQ ID NO: 554 - protein, 16 aa, Synthetic construct
IGSEIARWLSTLEISG

SEQ ID NO: 555 - protein, 281 aa, Synthetic construct
MAEIGTGFPFDPHYVEVLGERMHYVDVGPRDGTPVLFLHGNPTSSYVWRNIIPHVAPTHRCIAPDLIGMGKSDKPDLGYFFDDHVRFMDAFIEALGLEEVVLVIHDWGSALGFHWAKRNPERVKGIAFMEFIRPIPTWDEWPEFARETFQAFRTTDVGRKLIIDQNVFIEGTLPMGVVRPLTEVEMDHYREPFLNPVDREPLWRFPNELPIAGEPANIVALVEEYMDWLHQSPVPKLLFWGTPGVLIPPAEAARLAKSLPNCKAVDIGPGLNLLQEDNPDL

SEQ ID NO: 556 - protein, 15 aa, Synthetic construct
GSEIARWLSTLEISG

SEQ ID NO: 557 - protein, 282 aa, Synthetic construct
MAEIGTGFPFDPHYVEVLGERMHYVDVGPRDGTPVLFLHGNPTSSYVWRNIIPHVAPTHRCIAPDLIGMGKSDKPDLGYFFDDHVRFMDAFIEALGLEEVVLVIHDWGSALGFHWAKRNPERVKGIAFMEFIRPIPTWDEWPEFARETFQAFRTTDVGRKLIIDQNVFIEGTLPMGVVRPLTEVEMDHYREPFLNPVDREPLWRFPNELPIAGEPANIVALVEEYMDWLHQSPVPKLLFWGTPGVLIPPAEAARLAKSLPNCKAVDIGPGLNLLQEDNPDLI

SEQ ID NO: 558 - protein, 14 aa, Synthetic construct
SEIARWLSTLEISG

SEQ ID NO: 559 - protein, 283 aa, Synthetic construct
MAEIGTGFPFDPHYVEVLGERMHYVDVGPRDGTPVLFLHGNPTSSYVWRNIIPHVAPTHRCIAPDLIGMGKSDKPDLGYFFDDHVRFMDAFIEALGLEEVVLVIHDWGSALGFHWAKRNPERVKGIAFMEFIRPIPTWDEWPEFARETFQAFRTTDVGRKLIIDQNVFIEGTLPMGVVRPLTEVEMDHYREPFLNPVDREPLWRFPNELPIAGEPANIVALVEEYMDWLHQSPVPKLLFWGTPGVLIPPAEAARLAKSLPNCKAVDIGPGLNLLQEDNPDLIG

SEQ ID NO: 560 - protein, 13 aa, Synthetic construct
EIARWLSTLEISG

SEQ ID NO: 561 - protein, 284 aa, Synthetic construct
MAEIGTGFPFDPHYVEVLGERMHYVDVGPRDGTPVLFLHGNPTSSYVWRNIIPHVAPTHRCIAPDLIGMGKSDKPDLGYFFDDHVRFMDAFIEALGLEEVVLVIHDWGSALGFHWAKRNPERVKGIAFMEFIRPIPTWDEWPEFARETFQAFRTTDVGRKLIIDQNVFIEGTLPMGVVRPLTEVEMDHYREPFLNPVDREPLWRFPNELPIAGEPANIVALVEEYMDWLHQSPVPKLLFWGTPGVLIPPAEAARLAKSLPNCKAVDIGPGLNLLQEDNPDLIGS

SEQ ID NO: 562 - protein, 12 aa, Synthetic construct
IARWLSTLEISG

SEQ ID NO: 563 - protein, 285 aa, Synthetic construct
MAEIGTGFPFDPHYVEVLGERMHYVDVGPRDGTPVLFLHGNPTSSYVWRNIIPHVAPTHRCIAPDLIGMGKSDKPDLGYFFDDHVRFMDAFIEALGLEEVVLVIHDWGSALGFHWAKRNPERVKGIAFMEFIRPIPTWDEWPEFARETFQAFRTTDVGRKLIIDQNVFIEGTLPMGVVRPLTEVEMDHYREPFLNPVDREPLWRFPNELPIAGEPANIVALVEEYMDWLHQSPVPKLLFWGTPGVLIPPAEAARLAKSLPNCKAVDIGPGLNLLQEDNPDLIGSE

SEQ ID NO: 564 - protein, 11 aa, Synthetic construct
ARWLSTLEISG

SEQ ID NO: 565 - protein, 286 aa, Synthetic construct
MAEIGTGFPFDPHYVEVLGERMHYVDVGPRDGTPVLFLHGNPTSSYVWRNIIPHVAPTHRCIAPDLIGMGKSDKPDLGYFFDDHVRFMDAFIEALGLEEVVLVIHDWGSALGFHWAKRNPERVKGIAFMEFIRPIPTWDEWPEFARETFQAFRTTDVGRKLIIDQNVFIEGTLPMGVVRPLTEVEMDHYREPFLNPVDREPLWRFPNELPIAGEPANIVALVEEYMDWLHQSPVPKLLFWGTPGVLIPPAEAARLAKSLPNCKAVDIGPGLNLLQEDNPDLIGSEI

SEQ ID NO: 566 - protein, 10 aa, Synthetic construct
RWLSTLEISG

SEQ ID NO: 567 - protein, 287 aa, Synthetic construct
MAEIGTGFPFDPHYVEVLGERMHYVDVGPRDGTPVLFLHGNPTSSYVWRNIIPHVAPTHRCIAPDLIGMGKSDKPDLGYFFDDHVRFMDAFIEALGLEEVVLVIHDWGSALGFHWAKRNPERVKGIAFMEFIRPIPTWDEWPEFARETFQAFRTTDVGRKLIIDQNVFIEGTLPMGVVRPLTEVEMDHYREPFLNPVDREPLWRFPNELPIAGEPANIVALVEEYMDWLHQSPVPKLLFWGTPGVLIPPAEAARLAKSLPNCKAVDIGPGLNLLQEDNPDLIGSEIA

SEQ ID NO: 568 - protein, 9 aa, Synthetic construct
WLSTLEISG

SEQ ID NO: 569 - protein, 288 aa, Synthetic construct
MAEIGTGFPFDPHYVEVLGERMHYVDVGPRDGTPVLFLHGNPTSSYVWRNIIPHVAPTHRCIAPDLIGMGKSDKPDLGYFFDDHVRFMDAFIEALGLEEVVLVIHDWGSALGFHWAKRNPERVKGIAFMEFIRPIPTWDEWPEFARETFQAFRTTDVGRKLIIDQNVFIEGTLPMGVVRPLTEVEMDHYREPFLNPVDREPLWRFPNELPIAGEPANIVALVEEYMDWLHQSPVPKLLFWGTPGVLIPPAEAARLAKSLPNCKAVDIGPGLNLLQEDNPDLIGSEIAR

SEQ ID NO: 570 - protein, 8 aa, Synthetic construct
LSTLEISG

SEQ ID NO: 571 - protein, 289 aa, Synthetic construct
MAEIGTGFPFDPHYVEVLGERMHYVDVGPRDGTPVLFLHGNPTSSYVWRNIIPHVAPTHRCIAPDLIGMGKSDKPDLGYFFDDHVRFMDAFIEALGLEEVVLVIHDWGSALGFHWAKRNPERVKGIAFMEFIRPIPTWDEWPEFARETFQAFRTTDVGRKLIIDQNVFIEGTLPMGVVRPLTEVEMDHYREPFLNPVDREPLWRFPNELPIAGEPANIVALVEEYMDWLHQSPVPKLLFWGTPGVLIPPAEAARLAKSLPNCKAVDIGPGLNLLQEDNPDLIGSEIARW

SEQ ID NO: 572 - protein, 7 aa, Synthetic construct
STLEISG

SEQ ID NO: 573 - protein, 290 aa, Synthetic construct
MAEIGTGFPFDPHYVEVLGERMHYVDVGPRDGTPVLFLHGNPTSSYVWRNIIPHVAPTHRCIAPDLIGMGKSDKPDLGYFFDDHVRFMDAFIEALGLEEVVLVIHDWGSALGFHWAKRNPERVKGIAFMEFIRPIPTWDEWPEFARETFQAFRTTDVGRKLIIDQNVFIEGTLPMGVVRPLTEVEMDHYREPFLNPVDREPLWRFPNELPIAGEPANIVALVEEYMDWLHQSPVPKLLFWGTPGVLIPPAEAARLAKSLPNCKAVDIGPGLNLLQEDNPDLIGSEIARWL

SEQ ID NO: 574 - protein, 6 aa, Synthetic construct
TLEISG

SEQ ID NO: 575 - protein, 291 aa, Synthetic construct
MAEIGTGFPFDPHYVEVLGERMHYVDVGPRDGTPVLFLHGNPTSSYVWRNIIPHVAPTHRCIAPDLIGMGKSDKPDLGYFFDDHVRFMDAFIEALGLEEVVLVIHDWGSALGFHWAKRNPERVKGIAFMEFIRPIPTWDEWPEFARETFQAFRTTDVGRKLIIDQNVFIEGTLPMGVVRPLTEVEMDHYREPFLNPVDREPLWRFPNELPIAGEPANIVALVEEYMDWLHQSPVPKLLFWGTPGVLIPPAEAARLAKSLPNCKAVDIGPGLNLLQEDNPDLIGSEIARWLS

SEQ ID NO: 576 - protein, 5 aa, Synthetic construct
LEISG

SEQ ID NO: 577 - protein, 292 aa, Synthetic construct
MAEIGTGFPFDPHYVEVLGERMHYVDVGPRDGTPVLFLHGNPTSSYVWRNIIPHVAPTHRCIAPDLIGMGKSDKPDLGYFFDDHVRFMDAFIEALGLEEVVLVIHDWGSALGFHWAKRNPERVKGIAFMEFIRPIPTWDEWPEFARETFQAFRTTDVGRKLIIDQNVFIEGTLPMGVVRPLTEVEMDHYREPFLNPVDREPLWRFPNELPIAGEPANIVALVEEYMDWLHQSPVPKLLFWGTPGVLIPPAEAARLAKSLPNCKAVDIGPGLNLLQEDNPDLIGSEIARWLST

SEQ ID NO: 578 - protein, 17 aa, Synthetic construct
EIGTGFPFDPHYVEVLG

SEQ ID NO: 579 - protein, 17 aa, Synthetic construct
AIGTGFPFDPHYVEVLG

SEQ ID NO: 580 - protein, 17 aa, Synthetic construct
CIGTGFPFDPHYVEVLG

SEQ ID NO: 581 - protein, 17 aa, Synthetic construct
DIGTGFPFDPHYVEVLG

SEQ ID NO: 582 - protein, 17 aa, Synthetic construct
GIGTGFPFDPHYVEVLG

SEQ ID NO: 583 - protein, 17 aa, Synthetic construct
FIGTGFPFDPHYVEVLG

SEQ ID NO: 584 - protein, 17 aa, Synthetic construct
IIGTGFPFDPHYVEVLG

SEQ ID NO: 585 - protein, 17 aa, Synthetic construct
HIGTGFPFDPHYVEVLG

SEQ ID NO: 586 - protein, 17 aa, Synthetic construct
KIGTGFPFDPHYVEVLG

SEQ ID NO: 587 - protein, 17 aa, Synthetic construct
MIGTGFPFDPHYVEVLG

SEQ ID NO: 588 - protein, 17 aa, Synthetic construct
LIGTGFPFDPHYVEVLG

SEQ ID NO: 589 - protein, 17 aa, Synthetic construct
NIGTGFPFDPHYVEVLG

SEQ ID NO: 590 - protein, 17 aa, Synthetic construct
PIGTGFPFDPHYVEVLG

SEQ ID NO: 591 - protein, 17 aa, Synthetic construct
QIGTGFPFDPHYVEVLG

SEQ ID NO: 592 - protein, 17 aa, Synthetic construct
SIGTGFPFDPHYVEVLG

SEQ ID NO: 593 - protein, 17 aa, Synthetic construct
RIGTGFPFDPHYVEVLG

SEQ ID NO: 594 - protein, 17 aa, Synthetic construct
TIGTGFPFDPHYVEVLG

SEQ ID NO: 595 - protein, 17 aa, Synthetic construct
WIGTGFPFDPHYVEVLG

SEQ ID NO: 596 - protein, 17 aa, Synthetic construct
VIGTGFPFDPHYVEVLG

SEQ ID NO: 597 - protein, 17 aa, Synthetic construct
YIGTGFPFDPHYVEVLG

SEQ ID NO: 598 - protein, 17 aa, Synthetic construct
EAGTGFPFDPHYVEVLG

SEQ ID NO: 599 - protein, 17 aa, Synthetic construct
ECGTGFPFDPHYVEVLG

SEQ ID NO: 600 - protein, 17 aa, Synthetic construct
EEGTGFPFDPHYVEVLG

SEQ ID NO: 601 - protein, 17 aa, Synthetic construct
EDGTGFPFDPHYVEVLG

SEQ ID NO: 602 - protein, 17 aa, Synthetic construct
EGGTGFPFDPHYVEVLG

SEQ ID NO: 603 - protein, 17 aa, Synthetic construct
EFGTGFPFDPHYVEVLG

SEQ ID NO: 604 - protein, 17 aa, Synthetic construct
EHGTGFPFDPHYVEVLG

SEQ ID NO: 605 - protein, 17 aa, Synthetic construct
EKGTGFPFDPHYVEVLG

SEQ ID NO: 606 - protein, 17 aa, Synthetic construct
EMGTGFPFDPHYVEVLG

SEQ ID NO: 607 - protein, 17 aa, Synthetic construct
ELGTGFPFDPHYVEVLG

SEQ ID NO: 608 - protein, 17 aa, Synthetic construct
ENGTGFPFDPHYVEVLG

SEQ ID NO: 609 - protein, 17 aa, Synthetic construct
EPGTGFPFDPHYVEVLG

SEQ ID NO: 610 - protein, 17 aa, Synthetic construct
EQGTGFPFDPHYVEVLG

SEQ ID NO: 611 - protein, 17 aa, Synthetic construct
ESGTGFPFDPHYVEVLG

SEQ ID NO: 612 - protein, 17 aa, Synthetic construct
ERGTGFPFDPHYVEVLG

SEQ ID NO: 613 - protein, 17 aa, Synthetic construct
ETGTGFPFDPHYVEVLG

SEQ ID NO: 614 - protein, 17 aa, Synthetic construct
EWGTGFPFDPHYVEVLG

SEQ ID NO: 615 - protein, 17 aa, Synthetic construct
EVGTGFPFDPHYVEVLG

SEQ ID NO: 616 - protein, 17 aa, Synthetic construct
EYGTGFPFDPHYVEVLG

SEQ ID NO: 617 - protein, 17 aa, Synthetic construct
EIATGFPFDPHYVEVLG

SEQ ID NO: 618 - protein, 17 aa, Synthetic construct
EICTGFPFDPHYVEVLG

SEQ ID NO: 619 - protein, 17 aa, Synthetic construct
EIETGFPFDPHYVEVLG

SEQ ID NO: 620 - protein, 17 aa, Synthetic construct
EIDTGFPFDPHYVEVLG

SEQ ID NO: 621 - protein, 17 aa, Synthetic construct
EIFTGFPFDPHYVEVLG

SEQ ID NO: 622 - protein, 17 aa, Synthetic construct
EIITGFPFDPHYVEVLG

SEQ ID NO: 623 - protein, 17 aa, Synthetic construct
EIHTGFPFDPHYVEVLG

SEQ ID NO: 624 - protein, 17 aa, Synthetic construct
EIKTGFPFDPHYVEVLG

SEQ ID NO: 625 - protein, 17 aa, Synthetic construct
EIMTGFPFDPHYVEVLG

SEQ ID NO: 626 - protein, 17 aa, Synthetic construct
EILTGFPFDPHYVEVLG

SEQ ID NO: 627 - protein, 17 aa, Synthetic construct
EINTGFPFDPHYVEVLG

SEQ ID NO: 628 - protein, 17 aa, Synthetic construct
EIPTGFPFDPHYVEVLG

SEQ ID NO: 629 - protein, 17 aa, Synthetic construct
EIQTGFPFDPHYVEVLG

SEQ ID NO: 630 - protein, 17 aa, Synthetic construct
EISTGFPFDPHYVEVLG

SEQ ID NO: 631 - protein, 17 aa, Synthetic construct
EIRTGFPFDPHYVEVLG

SEQ ID NO: 632 - protein, 17 aa, Synthetic construct
EITTGFPFDPHYVEVLG

SEQ ID NO: 633 - protein, 17 aa, Synthetic construct
EIWTGFPFDPHYVEVLG

SEQ ID NO: 634 - protein, 17 aa, Synthetic construct
EIVTGFPFDPHYVEVLG

SEQ ID NO: 635 - protein, 17 aa, Synthetic construct
EIYTGFPFDPHYVEVLG

SEQ ID NO: 636 - protein, 17 aa, Synthetic construct
EIGAGFPFDPHYVEVLG

SEQ ID NO: 637 - protein, 17 aa, Synthetic construct
EIGCGFPFDPHYVEVLG

SEQ ID NO: 638 - protein, 17 aa, Synthetic construct
EIGEGFPFDPHYVEVLG

SEQ ID NO: 639 - protein, 17 aa, Synthetic construct
EIGDGFPFDPHYVEVLG

SEQ ID NO: 640 - protein, 17 aa, Synthetic construct
EIGGGFPFDPHYVEVLG

SEQ ID NO: 641 - protein, 17 aa, Synthetic construct
EIGFGFPFDPHYVEVLG

SEQ ID NO: 642 - protein, 17 aa, Synthetic construct
EIGIGFPFDPHYVEVLG

SEQ ID NO: 643 - protein, 17 aa, Synthetic construct
EIGHGFPFDPHYVEVLG

SEQ ID NO: 644 - protein, 17 aa, Synthetic construct
EIGKGFPFDPHYVEVLG

SEQ ID NO: 645 - protein, 17 aa, Synthetic construct
EIGMGFPFDPHYVEVLG

SEQ ID NO: 646 - protein, 17 aa, Synthetic construct
EIGLGFPFDPHYVEVLG

SEQ ID NO: 647 - protein, 17 aa, Synthetic construct
EIGNGFPFDPHYVEVLG

SEQ ID NO: 648 - protein, 17 aa, Synthetic construct
EIGPGFPFDPHYVEVLG

SEQ ID NO: 649 - protein, 17 aa, Synthetic construct
EIGQGFPFDPHYVEVLG

SEQ ID NO: 650 - protein, 17 aa, Synthetic construct
EIGSGFPFDPHYVEVLG

SEQ ID NO: 651 - protein, 17 aa, Synthetic construct
EIGRGFPFDPHYVEVLG

SEQ ID NO: 652 - protein, 17 aa, Synthetic construct
EIGWGFPFDPHYVEVLG

SEQ ID NO: 653 - protein, 17 aa, Synthetic construct
EIGVGFPFDPHYVEVLG

SEQ ID NO: 654 - protein, 17 aa, Synthetic construct
EIGYGFPFDPHYVEVLG

SEQ ID NO: 655 - protein, 17 aa, Synthetic construct
EIGTAFPFDPHYVEVLG

SEQ ID NO: 656 - protein, 17 aa, Synthetic construct
EIGTCFPFDPHYVEVLG

SEQ ID NO: 657 - protein, 17 aa, Synthetic construct
EIGTEFPFDPHYVEVLG

SEQ ID NO: 658 - protein, 17 aa, Synthetic construct
EIGTDFPFDPHYVEVLG

SEQ ID NO: 659 - protein, 17 aa, Synthetic construct
EIGTFFPFDPHYVEVLG

SEQ ID NO: 660 - protein, 17 aa, Synthetic construct
EIGTIFPFDPHYVEVLG

SEQ ID NO: 661 - protein, 17 aa, Synthetic construct
EIGTHFPFDPHYVEVLG

SEQ ID NO: 662 - protein, 17 aa, Synthetic construct
EIGTKFPFDPHYVEVLG

SEQ ID NO: 663 - protein, 17 aa, Synthetic construct
EIGTMFPFDPHYVEVLG

SEQ ID NO: 664 - protein, 17 aa, Synthetic construct
EIGTLFPFDPHYVEVLG

SEQ ID NO: 665 - protein, 17 aa, Synthetic construct
EIGTNFPFDPHYVEVLG

SEQ ID NO: 666 - protein, 17 aa, Synthetic construct
EIGTPFPFDPHYVEVLG

SEQ ID NO: 667 - protein, 17 aa, Synthetic construct
EIGTQFPFDPHYVEVLG

SEQ ID NO: 668 - protein, 17 aa, Synthetic construct
EIGTSFPFDPHYVEVLG

SEQ ID NO: 669 - protein, 17 aa, Synthetic construct
EIGTRFPFDPHYVEVLG

SEQ ID NO: 670 - protein, 17 aa, Synthetic construct
EIGTTFPFDPHYVEVLG

SEQ ID NO: 671 - protein, 17 aa, Synthetic construct
EIGTWFPFDPHYVEVLG

SEQ ID NO: 672 - protein, 17 aa, Synthetic construct
EIGTVFPFDPHYVEVLG

SEQ ID NO: 673 - protein, 17 aa, Synthetic construct
EIGTYFPFDPHYVEVLG

SEQ ID NO: 674 - protein, 17 aa, Synthetic construct
EIGTGAPFDPHYVEVLG

SEQ ID NO: 675 - protein, 17 aa, Synthetic construct
EIGTGCPFDPHYVEVLG

SEQ ID NO: 676 - protein, 17 aa, Synthetic construct
EIGTGEPFDPHYVEVLG

SEQ ID NO: 677 - protein, 17 aa, Synthetic construct
EIGTGDPFDPHYVEVLG

SEQ ID NO: 678 - protein, 17 aa, Synthetic construct
EIGTGGPFDPHYVEVLG

SEQ ID NO: 679 - protein, 17 aa, Synthetic construct
EIGTGIPFDPHYVEVLG

SEQ ID NO: 680 - protein, 17 aa, Synthetic construct
EIGTGHPFDPHYVEVLG

SEQ ID NO: 681 - protein, 17 aa, Synthetic construct
EIGTGKPFDPHYVEVLG

SEQ ID NO: 682 - protein, 17 aa, Synthetic construct
EIGTGMPFDPHYVEVLG

SEQ ID NO: 683 - protein, 17 aa, Synthetic construct
EIGTGLPFDPHYVEVLG

SEQ ID NO: 684 - protein, 17 aa, Synthetic construct
EIGTGNPFDPHYVEVLG

SEQ ID NO: 685 - protein, 17 aa, Synthetic construct
EIGTGPPFDPHYVEVLG

SEQ ID NO: 686 - protein, 17 aa, Synthetic construct
EIGTGQPFDPHYVEVLG

SEQ ID NO: 687 - protein, 17 aa, Synthetic construct
EIGTGSPFDPHYVEVLG

SEQ ID NO: 688 - protein, 17 aa, Synthetic construct
EIGTGRPFDPHYVEVLG

SEQ ID NO: 689 - protein, 17 aa, Synthetic construct
EIGTGTPFDPHYVEVLG

SEQ ID NO: 690 - protein, 17 aa, Synthetic construct
EIGTGWPFDPHYVEVLG

SEQ ID NO: 691 - protein, 17 aa, Synthetic construct
EIGTGVPFDPHYVEVLG

SEQ ID NO: 692 - protein, 17 aa, Synthetic construct
EIGTGYPFDPHYVEVLG

SEQ ID NO: 693 - protein, 17 aa, Synthetic construct
EIGTGFAFDPHYVEVLG

SEQ ID NO: 694 - protein, 17 aa, Synthetic construct
EIGTGFCFDPHYVEVLG

SEQ ID NO: 695 - protein, 17 aa, Synthetic construct
EIGTGFEFDPHYVEVLG

SEQ ID NO: 696 - protein, 17 aa, Synthetic construct
EIGTGFDFDPHYVEVLG

SEQ ID NO: 697 - protein, 17 aa, Synthetic construct
EIGTGFGFDPHYVEVLG

SEQ ID NO: 698 - protein, 17 aa, Synthetic construct
EIGTGFFFDPHYVEVLG

SEQ ID NO: 699 - protein, 17 aa, Synthetic construct
EIGTGFIFDPHYVEVLG

SEQ ID NO: 700 - protein, 17 aa, Synthetic construct
EIGTGFHFDPHYVEVLG

SEQ ID NO: 701 - protein, 17 aa, Synthetic construct
EIGTGFKFDPHYVEVLG

SEQ ID NO: 702 - protein, 17 aa, Synthetic construct
EIGTGFMFDPHYVEVLG

SEQ ID NO: 703 - protein, 17 aa, Synthetic construct
EIGTGFLFDPHYVEVLG

SEQ ID NO: 704 - protein, 17 aa, Synthetic construct
EIGTGFNFDPHYVEVLG

SEQ ID NO: 705 - protein, 17 aa, Synthetic construct
EIGTGFQFDPHYVEVLG

SEQ ID NO: 706 - protein, 17 aa, Synthetic construct
EIGTGFSFDPHYVEVLG

SEQ ID NO: 707 - protein, 17 aa, Synthetic construct
EIGTGFRFDPHYVEVLG

SEQ ID NO: 708 - protein, 17 aa, Synthetic construct
EIGTGFTFDPHYVEVLG

SEQ ID NO: 709 - protein, 17 aa, Synthetic construct
EIGTGFWFDPHYVEVLG

SEQ ID NO: 710 - protein, 17 aa, Synthetic construct
EIGTGFVFDPHYVEVLG

SEQ ID NO: 711 - protein, 17 aa, Synthetic construct
EIGTGFYFDPHYVEVLG

SEQ ID NO: 712 - protein, 17 aa, Synthetic construct
EIGTGFPADPHYVEVLG

SEQ ID NO: 713 - protein, 17 aa, Synthetic construct
EIGTGFPCDPHYVEVLG

SEQ ID NO: 714 - protein, 17 aa, Synthetic construct
EIGTGFPEDPHYVEVLG

SEQ ID NO: 715 - protein, 17 aa, Synthetic construct
EIGTGFPDDPHYVEVLG

SEQ ID NO: 716 - protein, 17 aa, Synthetic construct
EIGTGFPGDPHYVEVLG

SEQ ID NO: 717 - protein, 17 aa, Synthetic construct
EIGTGFPIDPHYVEVLG

SEQ ID NO: 718 - protein, 17 aa, Synthetic construct
EIGTGFPHDPHYVEVLG

SEQ ID NO: 719 - protein, 17 aa, Synthetic construct
EIGTGFPKDPHYVEVLG

SEQ ID NO: 720 - protein, 17 aa, Synthetic construct
EIGTGFPMDPHYVEVLG

SEQ ID NO: 721 - protein, 17 aa, Synthetic construct
EIGTGFPLDPHYVEVLG

SEQ ID NO: 722 - protein, 17 aa, Synthetic construct
EIGTGFPNDPHYVEVLG

SEQ ID NO: 723 - protein, 17 aa, Synthetic construct
EIGTGFPPDPHYVEVLG

SEQ ID NO: 724 - protein, 17 aa, Synthetic construct
EIGTGFPQDPHYVEVLG

SEQ ID NO: 725 - protein, 17 aa, Synthetic construct
EIGTGFPSDPHYVEVLG

SEQ ID NO: 726 - protein, 17 aa, Synthetic construct
EIGTGFPRDPHYVEVLG

SEQ ID NO: 727 - protein, 17 aa, Synthetic construct
EIGTGFPTDPHYVEVLG

SEQ ID NO: 728 - protein, 17 aa, Synthetic construct
EIGTGFPWDPHYVEVLG

SEQ ID NO: 729 - protein, 17 aa, Synthetic construct
EIGTGFPVDPHYVEVLG

SEQ ID NO: 730 - protein, 17 aa, Synthetic construct
EIGTGFPYDPHYVEVLG

SEQ ID NO: 731 - protein, 17 aa, Synthetic construct
EIGTGFPFAPHYVEVLG

SEQ ID NO: 732 - protein, 17 aa, Synthetic construct
EIGTGFPFCPHYVEVLG

SEQ ID NO: 733 - protein, 17 aa, Synthetic construct
EIGTGFPFEPHYVEVLG

SEQ ID NO: 734 - protein, 17 aa, Synthetic construct
EIGTGFPFGPHYVEVLG

SEQ ID NO: 735 - protein, 17 aa, Synthetic construct
EIGTGFPFFPHYVEVLG

SEQ ID NO: 736 - protein, 17 aa, Synthetic construct
EIGTGFPFIPHYVEVLG

SEQ ID NO: 737 - protein, 17 aa, Synthetic construct
EIGTGFPFHPHYVEVLG

SEQ ID NO: 738 - protein, 17 aa, Synthetic construct
EIGTGFPFKPHYVEVLG

SEQ ID NO: 739 - protein, 17 aa, Synthetic construct
EIGTGFPFMPHYVEVLG

SEQ ID NO: 740 - protein, 17 aa, Synthetic construct
EIGTGFPFLPHYVEVLG

SEQ ID NO: 741 - protein, 17 aa, Synthetic construct
EIGTGFPFNPHYVEVLG

SEQ ID NO: 742 - protein, 17 aa, Synthetic construct
EIGTGFPFPPHYVEVLG

SEQ ID NO: 743 - protein, 17 aa, Synthetic construct
EIGTGFPFQPHYVEVLG

SEQ ID NO: 744 - protein, 17 aa, Synthetic construct
EIGTGFPFSPHYVEVLG

SEQ ID NO: 745 - protein, 17 aa, Synthetic construct
EIGTGFPFRPHYVEVLG

SEQ ID NO: 746 - protein, 17 aa, Synthetic construct
EIGTGFPFTPHYVEVLG

SEQ ID NO: 747 - protein, 17 aa, Synthetic construct
EIGTGFPFWPHYVEVLG

SEQ ID NO: 748 - protein, 17 aa, Synthetic construct
EIGTGFPFVPHYVEVLG

SEQ ID NO: 749 - protein, 17 aa, Synthetic construct
EIGTGFPFYPHYVEVLG

SEQ ID NO: 750 - protein, 17 aa, Synthetic construct
EIGTGFPFDAHYVEVLG

SEQ ID NO: 751 - protein, 17 aa, Synthetic construct
EIGTGFPFDCHYVEVLG

SEQ ID NO: 752 - protein, 17 aa, Synthetic construct
EIGTGFPFDEHYVEVLG

SEQ ID NO: 753 - protein, 17 aa, Synthetic construct
EIGTGFPFDDHYVEVLG

SEQ ID NO: 754 - protein, 17 aa, Synthetic construct
EIGTGFPFDGHYVEVLG

SEQ ID NO: 755 - protein, 17 aa, Synthetic construct
EIGTGFPFDFHYVEVLG

SEQ ID NO: 756 - protein, 17 aa, Synthetic construct
EIGTGFPFDIHYVEVLG

SEQ ID NO: 757 - protein, 17 aa, Synthetic construct
EIGTGFPFDHHYVEVLG

SEQ ID NO: 758 - protein, 17 aa, Synthetic construct
EIGTGFPFDKHYVEVLG

SEQ ID NO: 759 - protein, 17 aa, Synthetic construct
EIGTGFPFDMHYVEVLG

SEQ ID NO: 760 - protein, 17 aa, Synthetic construct
EIGTGFPFDLHYVEVLG

SEQ ID NO: 761 - protein, 17 aa, Synthetic construct
EIGTGFPFDNHYVEVLG

SEQ ID NO: 762 - protein, 17 aa, Synthetic construct
EIGTGFPFDQHYVEVLG

SEQ ID NO: 763 - protein, 17 aa, Synthetic construct
EIGTGFPFDSHYVEVLG

SEQ ID NO: 764 - protein, 17 aa, Synthetic construct
EIGTGFPFDRHYVEVLG

SEQ ID NO: 765 - protein, 17 aa, Synthetic construct
EIGTGFPFDTHYVEVLG

SEQ ID NO: 766 - protein, 17 aa, Synthetic construct
EIGTGFPFDWHYVEVLG

SEQ ID NO: 767 - protein, 17 aa, Synthetic construct
EIGTGFPFDVHYVEVLG

SEQ ID NO: 768 - protein, 17 aa, Synthetic construct
EIGTGFPFDYHYVEVLG

SEQ ID NO: 769 - protein, 17 aa, Synthetic construct
EIGTGFPFDPAYVEVLG

SEQ ID NO: 770 - protein, 17 aa, Synthetic construct
EIGTGFPFDPCYVEVLG

SEQ ID NO: 771 - protein, 17 aa, Synthetic construct
EIGTGFPFDPEYVEVLG

SEQ ID NO: 772 - protein, 17 aa, Synthetic construct
EIGTGFPFDPDYVEVLG

SEQ ID NO: 773 - protein, 17 aa, Synthetic construct
EIGTGFPFDPGYVEVLG

SEQ ID NO: 774 - protein, 17 aa, Synthetic construct
EIGTGFPFDPFYVEVLG

SEQ ID NO: 775 - protein, 17 aa, Synthetic construct
EIGTGFPFDPIYVEVLG

SEQ ID NO: 776 - protein, 17 aa, Synthetic construct
EIGTGFPFDPKYVEVLG

SEQ ID NO: 777 - protein, 17 aa, Synthetic construct
EIGTGFPFDPMYVEVLG

SEQ ID NO: 778 - protein, 17 aa, Synthetic construct
EIGTGFPFDPLYVEVLG

SEQ ID NO: 779 - protein, 17 aa, Synthetic construct
EIGTGFPFDPNYVEVLG

SEQ ID NO: 780 - protein, 17 aa, Synthetic construct
EIGTGFPFDPPYVEVLG

SEQ ID NO: 781 - protein, 17 aa, Synthetic construct
EIGTGFPFDPQYVEVLG

SEQ ID NO: 782 - protein, 17 aa, Synthetic construct
EIGTGFPFDPSYVEVLG

SEQ ID NO: 783 - protein, 17 aa, Synthetic construct
EIGTGFPFDPRYVEVLG

SEQ ID NO: 784 - protein, 17 aa, Synthetic construct
EIGTGFPFDPTYVEVLG

SEQ ID NO: 785 - protein, 17 aa, Synthetic construct
EIGTGFPFDPWYVEVLG

SEQ ID NO: 786 - protein, 17 aa, Synthetic construct
EIGTGFPFDPVYVEVLG

SEQ ID NO: 787 - protein, 17 aa, Synthetic construct
EIGTGFPFDPYYVEVLG

SEQ ID NO: 788 - protein, 17 aa, Synthetic construct
EIGTGFPFDPHAVEVLG

SEQ ID NO: 789 - protein, 17 aa, Synthetic construct
EIGTGFPFDPHCVEVLG

SEQ ID NO: 790 - protein, 17 aa, Synthetic construct
EIGTGFPFDPHEVEVLG

SEQ ID NO: 791 - protein, 17 aa, Synthetic construct
EIGTGFPFDPHDVEVLG

SEQ ID NO: 792 - protein, 17 aa, Synthetic construct
EIGTGFPFDPHGVEVLG

SEQ ID NO: 793 - protein, 17 aa, Synthetic construct
EIGTGFPFDPHFVEVLG

SEQ ID NO: 794 - protein, 17 aa, Synthetic construct
EIGTGFPFDPHIVEVLG

SEQ ID NO: 795 - protein, 17 aa, Synthetic construct
EIGTGFPFDPHHVEVLG

SEQ ID NO: 796 - protein, 17 aa, Synthetic construct
EIGTGFPFDPHKVEVLG

SEQ ID NO: 797 - protein, 17 aa, Synthetic construct
EIGTGFPFDPHMVEVLG

SEQ ID NO: 798 - protein, 17 aa, Synthetic construct
EIGTGFPFDPHLVEVLG

SEQ ID NO: 799 - protein, 17 aa, Synthetic construct
EIGTGFPFDPHNVEVLG

SEQ ID NO: 800 - protein, 17 aa, Synthetic construct
EIGTGFPFDPHPVEVLG

SEQ ID NO: 801 - protein, 17 aa, Synthetic construct
EIGTGFPFDPHQVEVLG

SEQ ID NO: 802 - protein, 17 aa, Synthetic construct
EIGTGFPFDPHSVEVLG

SEQ ID NO: 803 - protein, 17 aa, Synthetic construct
EIGTGFPFDPHRVEVLG

SEQ ID NO: 804 - protein, 17 aa, Synthetic construct
EIGTGFPFDPHTVEVLG

SEQ ID NO: 805 - protein, 17 aa, Synthetic construct
EIGTGFPFDPHWVEVLG

SEQ ID NO: 806 - protein, 17 aa, Synthetic construct
EIGTGFPFDPHVVEVLG

SEQ ID NO: 807 - protein, 17 aa, Synthetic construct
EIGTGFPFDPHYAEVLG

SEQ ID NO: 808 - protein, 17 aa, Synthetic construct
EIGTGFPFDPHYCEVLG

SEQ ID NO: 809 - protein, 17 aa, Synthetic construct
EIGTGFPFDPHYEEVLG

SEQ ID NO: 810 - protein, 17 aa, Synthetic construct
EIGTGFPFDPHYDEVLG

SEQ ID NO: 811 - protein, 17 aa, Synthetic construct
EIGTGFPFDPHYGEVLG

SEQ ID NO: 812 - protein, 17 aa, Synthetic construct
EIGTGFPFDPHYFEVLG

SEQ ID NO: 813 - protein, 17 aa, Synthetic construct
EIGTGFPFDPHYIEVLG

SEQ ID NO: 814 - protein, 17 aa, Synthetic construct
EIGTGFPFDPHYHEVLG

SEQ ID NO: 815 - protein, 17 aa, Synthetic construct
EIGTGFPFDPHYKEVLG

SEQ ID NO: 816 - protein, 17 aa, Synthetic construct
EIGTGFPFDPHYMEVLG

SEQ ID NO: 817 - protein, 17 aa, Synthetic construct
EIGTGFPFDPHYLEVLG

SEQ ID NO: 818 - protein, 17 aa, Synthetic construct
EIGTGFPFDPHYNEVLG

SEQ ID NO: 819 - protein, 17 aa, Synthetic construct
EIGTGFPFDPHYPEVLG

SEQ ID NO: 820 - protein, 17 aa, Synthetic construct
EIGTGFPFDPHYQEVLG

SEQ ID NO: 821 - protein, 17 aa, Synthetic construct
EIGTGFPFDPHYSEVLG

SEQ ID NO: 822 - protein, 17 aa, Synthetic construct
EIGTGFPFDPHYREVLG

SEQ ID NO: 823 - protein, 17 aa, Synthetic construct
EIGTGFPFDPHYTEVLG

SEQ ID NO: 824 - protein, 17 aa, Synthetic construct
EIGTGFPFDPHYWEVLG

SEQ ID NO: 825 - protein, 17 aa, Synthetic construct
EIGTGFPFDPHYYEVLG

SEQ ID NO: 826 - protein, 17 aa, Synthetic construct
EIGTGFPFDPHYVAVLG

SEQ ID NO: 827 - protein, 17 aa, Synthetic construct
EIGTGFPFDPHYVCVLG

SEQ ID NO: 828 - protein, 17 aa, Synthetic construct
EIGTGFPFDPHYVDVLG

SEQ ID NO: 829 - protein, 17 aa, Synthetic construct
EIGTGFPFDPHYVGVLG

SEQ ID NO: 830 - protein, 17 aa, Synthetic construct
EIGTGFPFDPHYVFVLG

SEQ ID NO: 831 - protein, 17 aa, Synthetic construct
EIGTGFPFDPHYVIVLG

SEQ ID NO: 832 - protein, 17 aa, Synthetic construct
EIGTGFPFDPHYVHVLG

SEQ ID NO: 833 - protein, 17 aa, Synthetic construct
EIGTGFPFDPHYVKVLG

SEQ ID NO: 834 - protein, 17 aa, Synthetic construct
EIGTGFPFDPHYVMVLG

SEQ ID NO: 835 - protein, 17 aa, Synthetic construct
EIGTGFPFDPHYVLVLG

SEQ ID NO: 836 - protein, 17 aa, Synthetic construct
EIGTGFPFDPHYVNVLG

SEQ ID NO: 837 - protein, 17 aa, Synthetic construct
EIGTGFPFDPHYVPVLG

SEQ ID NO: 838 - protein, 17 aa, Synthetic construct
EIGTGFPFDPHYVQVLG

SEQ ID NO: 839 - protein, 17 aa, Synthetic construct
EIGTGFPFDPHYVSVLG

SEQ ID NO: 840 - protein, 17 aa, Synthetic construct
EIGTGFPFDPHYVRVLG

SEQ ID NO: 841 - protein, 17 aa, Synthetic construct
EIGTGFPFDPHYVTVLG

SEQ ID NO: 842 - protein, 17 aa, Synthetic construct
EIGTGFPFDPHYVWVLG

SEQ ID NO: 843 - protein, 17 aa, Synthetic construct
EIGTGFPFDPHYVVVLG

SEQ ID NO: 844 - protein, 17 aa, Synthetic construct
EIGTGFPFDPHYVYVLG

SEQ ID NO: 845 - protein, 17 aa, Synthetic construct
EIGTGFPFDPHYVEALG

SEQ ID NO: 846 - protein, 17 aa, Synthetic construct
EIGTGFPFDPHYVECLG

SEQ ID NO: 847 - protein, 17 aa, Synthetic construct
EIGTGFPFDPHYVEELG

SEQ ID NO: 848 - protein, 17 aa, Synthetic construct
EIGTGFPFDPHYVEDLG

SEQ ID NO: 849 - protein, 17 aa, Synthetic construct
EIGTGFPFDPHYVEGLG

SEQ ID NO: 850 - protein, 17 aa, Synthetic construct
EIGTGFPFDPHYVEFLG

SEQ ID NO: 851 - protein, 17 aa, Synthetic construct
EIGTGFPFDPHYVEILG

SEQ ID NO: 852 - protein, 17 aa, Synthetic construct
EIGTGFPFDPHYVEHLG

SEQ ID NO: 853 - protein, 17 aa, Synthetic construct
EIGTGFPFDPHYVEKLG

SEQ ID NO: 854 - protein, 17 aa, Synthetic construct
EIGTGFPFDPHYVEMLG

SEQ ID NO: 855 - protein, 17 aa, Synthetic construct
EIGTGFPFDPHYVELLG

SEQ ID NO: 856 - protein, 17 aa, Synthetic construct
EIGTGFPFDPHYVENLG

SEQ ID NO: 857 - protein, 17 aa, Synthetic construct
EIGTGFPFDPHYVEPLG

SEQ ID NO: 858 - protein, 17 aa, Synthetic construct
EIGTGFPFDPHYVEQLG

SEQ ID NO: 859 - protein, 17 aa, Synthetic construct
EIGTGFPFDPHYVESLG

SEQ ID NO: 860 - protein, 17 aa, Synthetic construct
EIGTGFPFDPHYVERLG

SEQ ID NO: 861 - protein, 17 aa, Synthetic construct
EIGTGFPFDPHYVETLG

SEQ ID NO: 862 - protein, 17 aa, Synthetic construct
EIGTGFPFDPHYVEWLG

SEQ ID NO: 863 - protein, 17 aa, Synthetic construct
EIGTGFPFDPHYVEYLG

SEQ ID NO: 864 - protein, 17 aa, Synthetic construct
EIGTGFPFDPHYVEVAG

SEQ ID NO: 865 - protein, 17 aa, Synthetic construct
EIGTGFPFDPHYVEVCG

SEQ ID NO: 866 - protein, 17 aa, Synthetic construct
EIGTGFPFDPHYVEVEG

SEQ ID NO: 867 - protein, 17 aa, Synthetic construct
EIGTGFPFDPHYVEVDG

SEQ ID NO: 868 - protein, 17 aa, Synthetic construct
EIGTGFPFDPHYVEVGG

SEQ ID NO: 869 - protein, 17 aa, Synthetic construct
EIGTGFPFDPHYVEVFG

SEQ ID NO: 870 - protein, 17 aa, Synthetic construct
EIGTGFPFDPHYVEVIG

SEQ ID NO: 871 - protein, 17 aa, Synthetic construct
EIGTGFPFDPHYVEVHG

SEQ ID NO: 872 - protein, 17 aa, Synthetic construct
EIGTGFPFDPHYVEVKG

SEQ ID NO: 873 - protein, 17 aa, Synthetic construct
EIGTGFPFDPHYVEVMG

SEQ ID NO: 874 - protein, 17 aa, Synthetic construct
EIGTGFPFDPHYVEVNG

SEQ ID NO: 875 - protein, 17 aa, Synthetic construct
EIGTGFPFDPHYVEVPG

SEQ ID NO: 876 - protein, 17 aa, Synthetic construct
EIGTGFPFDPHYVEVQG

SEQ ID NO: 877 - protein, 17 aa, Synthetic construct
EIGTGFPFDPHYVEVSG

SEQ ID NO: 878 - protein, 17 aa, Synthetic construct
EIGTGFPFDPHYVEVRG

SEQ ID NO: 879 - protein, 17 aa, Synthetic construct
EIGTGFPFDPHYVEVTG

SEQ ID NO: 880 - protein, 17 aa, Synthetic construct
EIGTGFPFDPHYVEVWG

SEQ ID NO: 881 - protein, 17 aa, Synthetic construct
EIGTGFPFDPHYVEVVG

SEQ ID NO: 882 - protein, 17 aa, Synthetic construct
EIGTGFPFDPHYVEVYG

SEQ ID NO: 883 - protein, 17 aa, Synthetic construct
EIGTGFPFDPHYVEVLA

SEQ ID NO: 884 - protein, 17 aa, Synthetic construct
EIGTGFPFDPHYVEVLC

SEQ ID NO: 885 - protein, 17 aa, Synthetic construct
EIGTGFPFDPHYVEVLE

SEQ ID NO: 886 - protein, 17 aa, Synthetic construct
EIGTGFPFDPHYVEVLD

SEQ ID NO: 887 - protein, 17 aa, Synthetic construct
EIGTGFPFDPHYVEVLF

SEQ ID NO: 888 - protein, 17 aa, Synthetic construct
EIGTGFPFDPHYVEVLI

SEQ ID NO: 889 - protein, 17 aa, Synthetic construct
EIGTGFPFDPHYVEVLH

SEQ ID NO: 890 - protein, 17 aa, Synthetic construct
EIGTGFPFDPHYVEVLK

SEQ ID NO: 891 - protein, 17 aa, Synthetic construct
EIGTGFPFDPHYVEVLM

SEQ ID NO: 892 - protein, 17 aa, Synthetic construct
EIGTGFPFDPHYVEVLL

SEQ ID NO: 893 - protein, 17 aa, Synthetic construct
EIGTGFPFDPHYVEVLN

SEQ ID NO: 894 - protein, 17 aa, Synthetic construct
EIGTGFPFDPHYVEVLP

SEQ ID NO: 895 - protein, 17 aa, Synthetic construct
EIGTGFPFDPHYVEVLQ

SEQ ID NO: 896 - protein, 17 aa, Synthetic construct
EIGTGFPFDPHYVEVLS

SEQ ID NO: 897 - protein, 17 aa, Synthetic construct
EIGTGFPFDPHYVEVLR

SEQ ID NO: 898 - protein, 17 aa, Synthetic construct
EIGTGFPFDPHYVEVLT

SEQ ID NO: 899 - protein, 17 aa, Synthetic construct
EIGTGFPFDPHYVEVLW

SEQ ID NO: 900 - protein, 17 aa, Synthetic construct
EIGTGFPFDPHYVEVLV

SEQ ID NO: 901 - protein, 17 aa, Synthetic construct
EIGTGFPFDPHYVEVLY

SEQ ID NO: 902 - protein, 17 aa, Synthetic construct
EIGTGWPWDPHYVEVLG

SEQ ID NO: 903 - protein, 17 aa, Synthetic construct
EIGTGWPYDPHYVEVLG

SEQ ID NO: 904 - protein, 17 aa, Synthetic construct
EIGTGWPFDPHFVEVLG

SEQ ID NO: 905 - protein, 17 aa, Synthetic construct
EIGTGWPFDPHWVEVLG

SEQ ID NO: 906 - protein, 17 aa, Synthetic construct
EIGTGWPFDPHYLEVLG

SEQ ID NO: 907 - protein, 17 aa, Synthetic construct
EIGTGWPFDPHYIEVLG

SEQ ID NO: 908 - protein, 17 aa, Synthetic construct
EIGTGWPFDPHYMEVLG

SEQ ID NO: 909 - protein, 17 aa, Synthetic construct
EIGTGWPFDPHYVELLG

SEQ ID NO: 910 - protein, 17 aa, Synthetic construct
EIGTGWPFDPHYVEILG

SEQ ID NO: 911 - protein, 17 aa, Synthetic construct
EIGTGYPWDPHYVEVLG

SEQ ID NO: 912 - protein, 17 aa, Synthetic construct
EIGTGYPYDPHYVEVLG

SEQ ID NO: 913 - protein, 17 aa, Synthetic construct
EIGTGYPFDPHFVEVLG

SEQ ID NO: 914 - protein, 17 aa, Synthetic construct
EIGTGYPFDPHWVEVLG

SEQ ID NO: 915 - protein, 17 aa, Synthetic construct
EIGTGYPFDPHYLEVLG

SEQ ID NO: 916 - protein, 17 aa, Synthetic construct
EIGTGYPFDPHYIEVLG

SEQ ID NO: 917 - protein, 17 aa, Synthetic construct
EIGTGYPFDPHYMEVLG

SEQ ID NO: 918 - protein, 17 aa, Synthetic construct
EIGTGYPFDPHYVELLG

SEQ ID NO: 919 - protein, 17 aa, Synthetic construct
EIGTGYPFDPHYVEILG

SEQ ID NO: 920 - protein, 17 aa, Synthetic construct
EIGTGMPWDPHYVEVLG

SEQ ID NO: 921 - protein, 17 aa, Synthetic construct
EIGTGMPYDPHYVEVLG

SEQ ID NO: 922 - protein, 17 aa, Synthetic construct
EIGTGMPFDPHFVEVLG

SEQ ID NO: 923 - protein, 17 aa, Synthetic construct
EIGTGMPFDPHWVEVLG

SEQ ID NO: 924 - protein, 17 aa, Synthetic construct
EIGTGMPFDPHYLEVLG

SEQ ID NO: 925 - protein, 17 aa, Synthetic construct
EIGTGMPFDPHYIEVLG

SEQ ID NO: 926 - protein, 17 aa, Synthetic construct
EIGTGMPFDPHYMEVLG

SEQ ID NO: 927 - protein, 17 aa, Synthetic construct
EIGTGMPFDPHYVELLG

SEQ ID NO: 928 - protein, 17 aa, Synthetic construct
EIGTGMPFDPHYVEILG

SEQ ID NO: 929 - protein, 17 aa, Synthetic construct
EIGTGFPWDPHFVEVLG

SEQ ID NO: 930 - protein, 17 aa, Synthetic construct
EIGTGFPWDPHWVEVLG

SEQ ID NO: 931 - protein, 17 aa, Synthetic construct
EIGTGFPWDPHYLEVLG

SEQ ID NO: 932 - protein, 17 aa, Synthetic construct
EIGTGFPWDPHYIEVLG

SEQ ID NO: 933 - protein, 17 aa, Synthetic construct
EIGTGFPWDPHYMEVLG

SEQ ID NO: 934 - protein, 17 aa, Synthetic construct
EIGTGFPWDPHYVELLG

SEQ ID NO: 935 - protein, 17 aa, Synthetic construct
EIGTGFPWDPHYVEILG

SEQ ID NO: 936 - protein, 17 aa, Synthetic construct
EIGTGFPYDPHFVEVLG

SEQ ID NO: 937 - protein, 17 aa, Synthetic construct
EIGTGFPYDPHWVEVLG

SEQ ID NO: 938 - protein, 17 aa, Synthetic construct
EIGTGFPYDPHYLEVLG

SEQ ID NO: 939 - protein, 17 aa, Synthetic construct
EIGTGFPYDPHYIEVLG

SEQ ID NO: 940 - protein, 17 aa, Synthetic construct
EIGTGFPYDPHYMEVLG

SEQ ID NO: 941 - protein, 17 aa, Synthetic construct
EIGTGFPYDPHYVELLG

SEQ ID NO: 942 - protein, 17 aa, Synthetic construct
EIGTGFPYDPHYVEILG

SEQ ID NO: 943 - protein, 17 aa, Synthetic construct
EIGTGFPFDPHFLEVLG

SEQ ID NO: 944 - protein, 17 aa, Synthetic construct
EIGTGFPFDPHFIEVLG

SEQ ID NO: 945 - protein, 17 aa, Synthetic construct
EIGTGFPFDPHFMEVLG

SEQ ID NO: 946 - protein, 17 aa, Synthetic construct
EIGTGFPFDPHFVELLG

SEQ ID NO: 947 - protein, 17 aa, Synthetic construct
EIGTGFPFDPHFVEILG

SEQ ID NO: 948 - protein, 17 aa, Synthetic construct
EIGTGFPFDPHWLEVLG

SEQ ID NO: 949 - protein, 17 aa, Synthetic construct
EIGTGFPFDPHWIEVLG

SEQ ID NO: 950 - protein, 17 aa, Synthetic construct
EIGTGFPFDPHWMEVLG

SEQ ID NO: 951 - protein, 17 aa, Synthetic construct
EIGTGFPFDPHWVELLG

SEQ ID NO: 952 - protein, 17 aa, Synthetic construct
EIGTGFPFDPHWVEILG

SEQ ID NO: 953 - protein, 17 aa, Synthetic construct
EIGTGFPFDPHYLELLG

SEQ ID NO: 954 - protein, 17 aa, Synthetic construct
EIGTGFPFDPHYLEILG

SEQ ID NO: 955 - protein, 17 aa, Synthetic construct
EIGTGFPFDPHYIELLG

SEQ ID NO: 956 - protein, 17 aa, Synthetic construct
EIGTGFPFDPHYIEILG

SEQ ID NO: 957 - protein, 17 aa, Synthetic construct
EIGTGFPFDPHYMELLG

SEQ ID NO: 958 - protein, 17 aa, Synthetic construct
EIGTGFPFDPHYMEILG

SEQ ID NO: 959 - protein, 17 aa, Synthetic construct
EDDTEFPFDPHYVEVLG

SEQ ID NO: 960 - protein, 17 aa, Synthetic construct
EDDTRFPFDPHYVEVLG

SEQ ID NO: 961 - protein, 17 aa, Synthetic construct
EDDTGFQFDPHYVEVLG

SEQ ID NO: 962 - protein, 17 aa, Synthetic construct
EDDTGFHFDPHYVEVLG

SEQ ID NO: 963 - protein, 17 aa, Synthetic construct
EDDTGFPFDEHYVEVLG

SEQ ID NO: 964 - protein, 17 aa, Synthetic construct
EDDTGFPFDAHYVEVLG

SEQ ID NO: 965 - protein, 17 aa, Synthetic construct
EDDTGFPFDPKYVEVLG

SEQ ID NO: 966 - protein, 17 aa, Synthetic construct
EDGTEFQFDPHYVEVLG

SEQ ID NO: 967 - protein, 17 aa, Synthetic construct
EDGTEFHFDPHYVEVLG

SEQ ID NO: 968 - protein, 17 aa, Synthetic construct
EDGTEFPFDEHYVEVLG

SEQ ID NO: 969 - protein, 17 aa, Synthetic construct
EDGTEFPFDAHYVEVLG

SEQ ID NO: 970 - protein, 17 aa, Synthetic construct
EDGTEFPFDPKYVEVLG

SEQ ID NO: 971 - protein, 17 aa, Synthetic construct
EDGTRFQFDPHYVEVLG

SEQ ID NO: 972 - protein, 17 aa, Synthetic construct
EDGTRFHFDPHYVEVLG

SEQ ID NO: 973 - protein, 17 aa, Synthetic construct
EDGTRFPFDAHYVEVLG

SEQ ID NO: 974 - protein, 17 aa, Synthetic construct
EDGTRFPFDPKYVEVLG

SEQ ID NO: 975 - protein, 17 aa, Synthetic construct
EDGTGFHFDPHYVEVLG

SEQ ID NO: 976 - protein, 17 aa, Synthetic construct
EDGTGFQFDEHYVEVLG

SEQ ID NO: 977 - protein, 17 aa, Synthetic construct
EDGTGFQFDAHYVEVLG

SEQ ID NO: 978 - protein, 17 aa, Synthetic construct
EDGTGFQFDPKYVEVLG

SEQ ID NO: 979 - protein, 17 aa, Synthetic construct
EIDTEFQFDPHYVEVLG

SEQ ID NO: 980 - protein, 17 aa, Synthetic construct
EIDTEFHFDPHYVEVLG

SEQ ID NO: 981 - protein, 17 aa, Synthetic construct
EIDTEFPFDEHYVEVLG

SEQ ID NO: 982 - protein, 17 aa, Synthetic construct
EIDTEFPFDAHYVEVLG

SEQ ID NO: 983 - protein, 17 aa, Synthetic construct
EIDTEFPFDPKYVEVLG

SEQ ID NO: 984 - protein, 17 aa, Synthetic construct
EIDTRFQFDPHYVEVLG

SEQ ID NO: 985 - protein, 17 aa, Synthetic construct
EIDTRFHFDPHYVEVLG

SEQ ID NO: 986 - protein, 17 aa, Synthetic construct
EIDTRFPFDEHYVEVLG

SEQ ID NO: 987 - protein, 17 aa, Synthetic construct
EIDTRFPFDAHYVEVLG

SEQ ID NO: 988 - protein, 17 aa, Synthetic construct
EIDTRFPFDPKYVEVLG

SEQ ID NO: 989 - protein, 17 aa, Synthetic construct
EIDTGFHFDPHYVEVLG

SEQ ID NO: 990 - protein, 17 aa, Synthetic construct
EIDTGFQFDAHYVEVLG

SEQ ID NO: 991 - protein, 17 aa, Synthetic construct
EIDTGFQFDPKYVEVLG

SEQ ID NO: 992 - protein, 17 aa, Synthetic construct
EFNDGFPFDPHYVEVLG

SEQ ID NO: 993 - protein, 17 aa, Synthetic construct
EFNTQFPFDPHYVEVLG

SEQ ID NO: 994 - protein, 17 aa, Synthetic construct
EFNTGFNFDPHYVEVLG

SEQ ID NO: 995 - protein, 17 aa, Synthetic construct
EFNTGFPFDFHYVEVLG

SEQ ID NO: 996 - protein, 17 aa, Synthetic construct
EFNTGFPFDNHYVEVLG

SEQ ID NO: 997 - protein, 17 aa, Synthetic construct
EFNTGFPFDPNYVEVLG

SEQ ID NO: 998 - protein, 17 aa, Synthetic construct
EFGDQFPFDPHYVEVLG

SEQ ID NO: 999 - protein, 17 aa, Synthetic construct
EFGDGFNFDPHYVEVLG

SEQ ID NO: 1000 - protein, 17 aa, Synthetic construct
EFGDGFPFDFHYVEVLG

SEQ ID NO: 1001 - protein, 17 aa, Synthetic construct
EFGDGFPFDNHYVEVLG

SEQ ID NO: 1002 - protein, 17 aa, Synthetic construct
EFGDGFPFDPNYVEVLG

SEQ ID NO: 1003 - protein, 17 aa, Synthetic construct
EFGTQFNFDPHYVEVLG

SEQ ID NO: 1004 - protein, 17 aa, Synthetic construct
EFGTQFPFDFHYVEVLG

SEQ ID NO: 1005 - protein, 17 aa, Synthetic construct
EFGTQFPFDNHYVEVLG

SEQ ID NO: 1006 - protein, 17 aa, Synthetic construct
EFGTQFPFDPNYVEVLG

SEQ ID NO: 1007 - protein, 17 aa, Synthetic construct
EFGTGFNFDFHYVEVLG

SEQ ID NO: 1008 - protein, 17 aa, Synthetic construct
EFGTGFNFDNHYVEVLG

SEQ ID NO: 1009 - protein, 17 aa, Synthetic construct
EFGTGFNFDPNYVEVLG

SEQ ID NO: 1010 - protein, 17 aa, Synthetic construct
EFGTGFPFDFNYVEVLG

SEQ ID NO: 1011 - protein, 17 aa, Synthetic construct
EINDQFPFDPHYVEVLG

SEQ ID NO: 1012 - protein, 17 aa, Synthetic construct
EINDGFNFDPHYVEVLG

SEQ ID NO: 1013 - protein, 17 aa, Synthetic construct
EINDGFPFDFHYVEVLG

SEQ ID NO: 1014 - protein, 17 aa, Synthetic construct
EINDGFPFDNHYVEVLG

SEQ ID NO: 1015 - protein, 17 aa, Synthetic construct
EINDGFPFDPNYVEVLG

SEQ ID NO: 1016 - protein, 17 aa, Synthetic construct
EINTQFNFDPHYVEVLG

SEQ ID NO: 1017 - protein, 17 aa, Synthetic construct
EINTQFPFDFHYVEVLG

SEQ ID NO: 1018 - protein, 17 aa, Synthetic construct
EINTQFPFDNHYVEVLG

SEQ ID NO: 1019 - protein, 17 aa, Synthetic construct
EINTQFPFDPNYVEVLG

SEQ ID NO: 1020 - protein, 17 aa, Synthetic construct
EINTGFNFDFHYVEVLG

SEQ ID NO: 1021 - protein, 17 aa, Synthetic construct
EINTGFNFDNHYVEVLG

SEQ ID NO: 1022 - protein, 17 aa, Synthetic construct
EINTGFNFDPNYVEVLG

SEQ ID NO: 1023 - protein, 17 aa, Synthetic construct
EINTGFPFDFNYVEVLG

SEQ ID NO: 1024 - protein, 17 aa, Synthetic construct
EIGDQFNFDPHYVEVLG

SEQ ID NO: 1025 - protein, 17 aa, Synthetic construct
EIGDQFPFDFHYVEVLG

SEQ ID NO: 1026 - protein, 17 aa, Synthetic construct
EIGDQFPFDNHYVEVLG

SEQ ID NO: 1027 - protein, 17 aa, Synthetic construct
EIGDQFPFDPNYVEVLG

SEQ ID NO: 1028 - protein, 17 aa, Synthetic construct
EIGDGFNFDFHYVEVLG

SEQ ID NO: 1029 - protein, 17 aa, Synthetic construct
EIGDGFNFDNHYVEVLG

SEQ ID NO: 1030 - protein, 17 aa, Synthetic construct
EIGDGFNFDPNYVEVLG

SEQ ID NO: 1031 - protein, 17 aa, Synthetic construct
EIGDGFPFDFNYVEVLG

SEQ ID NO: 1032 - protein, 17 aa, Synthetic construct
EIGTQFNFDFHYVEVLG

SEQ ID NO: 1033 - protein, 17 aa, Synthetic construct
EIGTQFNFDNHYVEVLG

SEQ ID NO: 1034 - protein, 17 aa, Synthetic construct
EIGTQFNFDPNYVEVLG

SEQ ID NO: 1035 - protein, 17 aa, Synthetic construct
EIGTQFPFDFNYVEVLG

SEQ ID NO: 1036 - protein, 17 aa, Synthetic construct
EIGTGFNFDFNYVEVLG

SEQ ID NO: 1037 - protein, 17 aa, Synthetic construct
ERKTEFPFDPHYVEVLG

SEQ ID NO: 1038 - protein, 17 aa, Synthetic construct
ERKTRFPFDPHYVEVLG

SEQ ID NO: 1039 - protein, 17 aa, Synthetic construct
ERKTGFQFDPHYVEVLG

SEQ ID NO: 1040 - protein, 17 aa, Synthetic construct
ERKTGFHFDPHYVEVLG

SEQ ID NO: 1041 - protein, 17 aa, Synthetic construct
ERKTGFPFDEHYVEVLG

SEQ ID NO: 1042 - protein, 17 aa, Synthetic construct
ERKTGFPFDAHYVEVLG

SEQ ID NO: 1043 - protein, 17 aa, Synthetic construct
ERKTGFPFDPKYVEVLG

SEQ ID NO: 1044 - protein, 17 aa, Synthetic construct
ERGTEFQFDPHYVEVLG

SEQ ID NO: 1045 - protein, 17 aa, Synthetic construct
ERGTEFHFDPHYVEVLG

SEQ ID NO: 1046 - protein, 17 aa, Synthetic construct
ERGTEFPFDEHYVEVLG

SEQ ID NO: 1047 - protein, 17 aa, Synthetic construct
ERGTEFPFDAHYVEVLG

SEQ ID NO: 1048 - protein, 17 aa, Synthetic construct
ERGTEFPFDPKYVEVLG

SEQ ID NO: 1049 - protein, 17 aa, Synthetic construct
ERGTRFQFDPHYVEVLG

SEQ ID NO: 1050 - protein, 17 aa, Synthetic construct
ERGTRFHFDPHYVEVLG

SEQ ID NO: 1051 - protein, 17 aa, Synthetic construct
ERGTRFPFDEHYVEVLG

SEQ ID NO: 1052 - protein, 17 aa, Synthetic construct
ERGTRFPFDAHYVEVLG

SEQ ID NO: 1053 - protein, 17 aa, Synthetic construct
ERGTRFPFDPKYVEVLG

SEQ ID NO: 1054 - protein, 17 aa, Synthetic construct
ERGTGFQFDEHYVEVLG

SEQ ID NO: 1055 - protein, 17 aa, Synthetic construct
ERGTGFQFDAHYVEVLG

SEQ ID NO: 1056 - protein, 17 aa, Synthetic construct
ERGTGFQFDPKYVEVLG

SEQ ID NO: 1057 - protein, 17 aa, Synthetic construct
EIKTEFQFDPHYVEVLG

SEQ ID NO: 1058 - protein, 17 aa, Synthetic construct
EIKTEFHFDPHYVEVLG

SEQ ID NO: 1059 - protein, 17 aa, Synthetic construct
EIKTEFPFDEHYVEVLG

SEQ ID NO: 1060 - protein, 17 aa, Synthetic construct
EIKTEFPFDAHYVEVLG

SEQ ID NO: 1061 - protein, 17 aa, Synthetic construct
EIKTEFPFDPKYVEVLG

SEQ ID NO: 1062 - protein, 17 aa, Synthetic construct
EIKTRFQFDPHYVEVLG

SEQ ID NO: 1063 - protein, 17 aa, Synthetic construct
EIKTRFHFDPHYVEVLG

SEQ ID NO: 1064 - protein, 17 aa, Synthetic construct
EIKTRFPFDEHYVEVLG

SEQ ID NO: 1065 - protein, 17 aa, Synthetic construct
EIKTRFPFDAHYVEVLG

SEQ ID NO: 1066 - protein, 17 aa, Synthetic construct
EIKTRFPFDPKYVEVLG

SEQ ID NO: 1067 - protein, 17 aa, Synthetic construct
EIKTGFQFDEHYVEVLG

SEQ ID NO: 1068 - protein, 17 aa, Synthetic construct
EIKTGFQFDAHYVEVLG

SEQ ID NO: 1069 - protein, 17 aa, Synthetic construct
EIKTGFQFDPKYVEVLG

SEQ ID NO: 1070 - protein, 17 aa, Synthetic construct
EIGTEFQFDEHYVEVLG

SEQ ID NO: 1071 - protein, 17 aa, Synthetic construct
EIGTEFQFDAHYVEVLG

SEQ ID NO: 1072 - protein, 17 aa, Synthetic construct
EIGTEFQFDPKYVEVLG

SEQ ID NO: 1073 - protein, 17 aa, Synthetic construct
EIGTRFQFDEHYVEVLG

SEQ ID NO: 1074 - protein, 17 aa, Synthetic construct
EIGTRFQFDAHYVEVLG

SEQ ID NO: 1075 - protein, 17 aa, Synthetic construct
EIGTRFQFDPKYVEVLG

SEQ ID NO: 1076 - protein, 17 aa, Synthetic construct
EIGTGFQFDEKYVEVLG

SEQ ID NO: 1077 - protein, 17 aa, Synthetic construct
EIGTGFQFDAKYVEVLG

SEQ ID NO: 1078 - protein, 17 aa, Synthetic construct
EIGTGWPYDPHFVEVLG

SEQ ID NO: 1079 - protein, 17 aa, Synthetic construct
EIGTGYPYDPHYLEVLG

SEQ ID NO: 1080 - protein, 17 aa, Synthetic construct
EIGTGFPYDPHWLEVLG

SEQ ID NO: 1081 - protein, 17 aa, Synthetic construct
EIGTGFPYDPHYIEILG

SEQ ID NO: 1082 - protein, 17 aa, Synthetic construct
EIGTGFPFDPHWIEILG

SEQ ID NO: 1083 - protein, 17 aa, Synthetic construct
EIGTGWPYDPHWLEVLG

SEQ ID NO: 1084 - protein, 17 aa, Synthetic construct
EIGTGWPYDPHYIEILG

SEQ ID NO: 1085 - protein, 17 aa, Synthetic construct
EIGTGYPYDPHFLEVLG

SEQ ID NO: 1086 - protein, 17 aa, Synthetic construct
EIGTGWPYDPHFLEILG

SEQ ID NO: 1087 - protein, 17 aa, Synthetic construct
ERKTRYPYDPHWLEVLG

SEQ ID NO: 1088 - protein, 17 aa, Synthetic construct
EINTQYNYDPHWLEVLG

SEQ ID NO: 1089 - protein, 17 aa, Synthetic construct
EIGDQYPYDPNWLEVLG

SEQ ID NO: 1090 - protein, 17 aa, Synthetic construct
EIGTRYQYDAHWLEVLG

SEQ ID NO: 1091 - protein, 17 aa, Synthetic construct
EIDTEYPYDEHWLEVLG

SEQ ID NO: 1092 - protein, 17 aa, Synthetic construct
ERKTRWPYDPHYIEILG

SEQ ID NO: 1093 - protein, 17 aa, Synthetic construct
EINTQWNYDPHYIEILG

SEQ ID NO: 1094 - protein, 17 aa, Synthetic construct
EIGDQWPYDPNYIEILG

SEQ ID NO: 1095 - protein, 17 aa, Synthetic construct
EIGTRWQYDAHYIEILG

SEQ ID NO: 1096 - protein, 17 aa, Synthetic construct
EIDTEWPYDEHYIEILG

SEQ ID NO: 1097 - protein, 17 aa, Synthetic construct
ERKTRWPYDPHFLEILG

SEQ ID NO: 1098 - protein, 17 aa, Synthetic construct
EINTQWNYDPHFLEILG

SEQ ID NO: 1099 - protein, 17 aa, Synthetic construct
EIGDQWPYDPNFLEILG

SEQ ID NO: 1100 - protein, 17 aa, Synthetic construct
EIGTRWQYDAHFLEILG

SEQ ID NO: 1101 - protein, 17 aa, Synthetic construct
EIDTEWPYDEHFLEILG

SEQ ID NO: 1102 - protein, 17 aa, Synthetic construct
EIGTQWNYDFHFLEILG

SEQ ID NO: 1103 - protein, 17 aa, Synthetic construct
EIGTGFPFRPHYVKVLG

SEQ ID NO: 1104 - protein, 17 aa, Synthetic construct
EIGTGFPFRPHYVRVLG

SEQ ID NO: 1105 - protein, 17 aa, Synthetic construct
EIGTGFPFRPHYVEVRG

SEQ ID NO: 1106 - protein, 17 aa, Synthetic construct
EIGTGFPFRPHYVEVLR

SEQ ID NO: 1107 - protein, 17 aa, Synthetic construct
EIGTGFPFDPHYVKVRG

SEQ ID NO: 1108 - protein, 17 aa, Synthetic construct
EIGTGFPFDPHYVKVLR

SEQ ID NO: 1109 - protein, 17 aa, Synthetic construct
EIGTGFPFDPHYVRVRG

SEQ ID NO: 1110 - protein, 17 aa, Synthetic construct
EIGTGFPFDPHYVRVLR

SEQ ID NO: 1111 - protein, 17 aa, Synthetic construct
EIGTGFPFRPHYVKVRG

SEQ ID NO: 1112 - protein, 17 aa, Synthetic construct
EIGTGFPFRPHYVKVLR

SEQ ID NO: 1113 - protein, 17 aa, Synthetic construct
EIGTGFPFRPHYVRVRG

SEQ ID NO: 1114 - protein, 17 aa, Synthetic construct
EIGTGFPFRPHYVRVLR

SEQ ID NO: 1115 - protein, 17 aa, Synthetic construct
EIGTGFPFRPHYVKVRR

SEQ ID NO: 1116 - protein, 17 aa, Synthetic construct
ERKTRFPFRPHYVKVRG

SEQ ID NO: 1117 - protein, 17 aa, Synthetic construct
EINTQFNFRPHYVKVRG

SEQ ID NO: 1118 - protein, 17 aa, Synthetic construct
EIGDQFPFRPNYVKVRG

SEQ ID NO: 1119 - protein, 17 aa, Synthetic construct
EIGTRFQFRAHYVKVRG

SEQ ID NO: 1120 - protein, 17 aa, Synthetic construct
EIDTEFPFREHYVKVRG

SEQ ID NO: 1121 - protein, 17 aa, Synthetic construct
ERKTRFPFRPHYVKVLR

SEQ ID NO: 1122 - protein, 17 aa, Synthetic construct
EINTQFNFRPHYVKVLR

SEQ ID NO: 1123 - protein, 17 aa, Synthetic construct
EIGDQFPFRPNYVKVLR

SEQ ID NO: 1124 - protein, 17 aa, Synthetic construct
EIGTRFQFRAHYVKVLR

SEQ ID NO: 1125 - protein, 17 aa, Synthetic construct
EIDTEFPFREHYVKVLR

SEQ ID NO: 1126 - protein, 17 aa, Synthetic construct
ERKTRFPFRPHYVKVRR

SEQ ID NO: 1127 - protein, 17 aa, Synthetic construct
EINTQFNFRPHYVKVRR

SEQ ID NO: 1128 - protein, 17 aa, Synthetic construct
EIGDQFPFRPNYVKVRR

SEQ ID NO: 1129 - protein, 17 aa, Synthetic construct
EIGTRFQFRAHYVKVRR

SEQ ID NO: 1130 - protein, 17 aa, Synthetic construct
EIDTEFPFREHYVKVRR

SEQ ID NO: 1131 - protein, 17 aa, Synthetic construct
EIGTQFNFRFHYVKVRR

SEQ ID NO: 1132 - protein, 17 aa, Synthetic construct
EINDQFNFRPHYVKVRR

SEQ ID NO: 1133 - protein, 17 aa, Synthetic construct
EINTQFNFRPNYVKVRR

SEQ ID NO: 1134 - protein, 17 aa, Synthetic construct
EINDQFNFRPNYVKVRR

SEQ ID NO: 1135 - protein, 17 aa, Synthetic construct
ARNDQFNFRANYVKVRR

SEQ ID NO: 1136 - protein, 17 aa, Synthetic construct
ARNDQFNFRENYVKVRR

SEQ ID NO: 1137 - protein, 17 aa, Synthetic construct
ARNDQFNFRSNYVKVRR

SEQ ID NO: 1138 - protein, 17 aa, Synthetic construct
DRNDQFNFRANYVKVRR

SEQ ID NO: 1139 - protein, 17 aa, Synthetic construct
DRNDQFNFRENYVKVRR

SEQ ID NO: 1140 - protein, 17 aa, Synthetic construct
DRNDQFNFRSNYVKVRR

SEQ ID NO: 1141 - protein, 17 aa, Synthetic construct
KRNDQFNFRANYVKVRR

SEQ ID NO: 1142 - protein, 17 aa, Synthetic construct
KRNDQFNFRENYVKVRR

SEQ ID NO: 1143 - protein, 17 aa, Synthetic construct
KRNDQFNFRSNYVKVRR

SEQ ID NO: 1144 - protein, 17 aa, Synthetic construct
AFNDQFNFRANYVKVRR

SEQ ID NO: 1145 - protein, 17 aa, Synthetic construct
DFNDQFNFRANYVKVRR

SEQ ID NO: 1146 - protein, 17 aa, Synthetic construct
KFNDQFNFRANYVKVRR

SEQ ID NO: 1147 - protein, 17 aa, Synthetic construct
ADNDQFNFRANYVKVRR

SEQ ID NO: 1148 - protein, 17 aa, Synthetic construct
DDNDQFNFRANYVKVRR

SEQ ID NO: 1149 - protein, 17 aa, Synthetic construct
KDNDQFNFRANYVKVRR

SEQ ID NO: 1150 - protein, 17 aa, Synthetic construct
EIGTGWPYRPHFLKIRR

SEQ ID NO: 1151 - protein, 17 aa, Synthetic construct
ARGTGWPYRAHFLKIRR

SEQ ID NO: 1152 - protein, 17 aa, Synthetic construct
ARGTGWPYREHFLKIRR

SEQ ID NO: 1153 - protein, 17 aa, Synthetic construct
ARGTGWPYRSHFLKIRR

SEQ ID NO: 1154 - protein, 17 aa, Synthetic construct
DRGTGWPYRAHFLKIRR

SEQ ID NO: 1155 - protein, 17 aa, Synthetic construct
DRGTGWPYREHFLKIRR

SEQ ID NO: 1156 - protein, 17 aa, Synthetic construct
DRGTGWPYRSHFLKIRR

SEQ ID NO: 1157 - protein, 17 aa, Synthetic construct
KRGTGWPYRAHFLKIRR

SEQ ID NO: 1158 - protein, 17 aa, Synthetic construct
KRGTGWPYREHFLKIRR

SEQ ID NO: 1159 - protein, 17 aa, Synthetic construct
KRGTGWPYRSHFLKIRR

SEQ ID NO: 1160 - protein, 17 aa, Synthetic construct
AFGTGWPYRAHFLKIRR

SEQ ID NO: 1161 - protein, 17 aa, Synthetic construct
DFGTGWPYRAHFLKIRR

SEQ ID NO: 1162 - protein, 17 aa, Synthetic construct
KFGTGWPYRAHFLKIRR

SEQ ID NO: 1163 - protein, 17 aa, Synthetic construct
ADGTGWPYRAHFLKIRR

SEQ ID NO: 1164 - protein, 17 aa, Synthetic construct
DDGTGWPYRAHFLKIRR

SEQ ID NO: 1165 - protein, 17 aa, Synthetic construct
KDGTGWPYRAHFLKIRR

SEQ ID NO: 1166 - protein, 17 aa, Synthetic construct
EIGDGWPYRPHFLKIRR

SEQ ID NO: 1167 - protein, 17 aa, Synthetic construct
EIGTGWPYRPNFLKIRR

SEQ ID NO: 1168 - protein, 17 aa, Synthetic construct
EIGDGWPYRPNFLKIRR

SEQ ID NO: 1169 - protein, 17 aa, Synthetic construct
EINTQWNYRPHFLKIRR

SEQ ID NO: 1170 - protein, 17 aa, Synthetic construct
EINDQWNYRPHFLKIRR

SEQ ID NO: 1171 - protein, 17 aa, Synthetic construct
EINDQWNYRPNFLKIRR

SEQ ID NO: 1172 - protein, 17 aa, Synthetic construct
EIGDQWPYRPNFLKIRR

SEQ ID NO: 1173 - protein, 17 aa, Synthetic construct
ARNDQWNYRANFLKIRR

SEQ ID NO: 1174 - protein, 17 aa, Synthetic construct
ARNDQWNYRENFLKIRR

SEQ ID NO: 1175 - protein, 17 aa, Synthetic construct
ARNDQWNYRSNFLKIRR

SEQ ID NO: 1176 - protein, 17 aa, Synthetic construct
DRNDQWNYRANFLKIRR

SEQ ID NO: 1177 - protein, 17 aa, Synthetic construct
DRNDQWNYRENFLKIRR

SEQ ID NO: 1178 - protein, 17 aa, Synthetic construct
DRNDQWNYRSNFLKIRR

SEQ ID NO: 1179 - protein, 17 aa, Synthetic construct
KRNDQWNYRANFLKIRR

SEQ ID NO: 1180 - protein, 17 aa, Synthetic construct
KRNDQWNYRENFLKIRR

SEQ ID NO: 1181 - protein, 17 aa, Synthetic construct
KRNDQWNYRSNFLKIRR

SEQ ID NO: 1182 - protein, 17 aa, Synthetic construct
AFNDQWNYRANFLKIRR

SEQ ID NO: 1183 - protein, 17 aa, Synthetic construct
DFNDQWNYRANFLKIRR

SEQ ID NO: 1184 - protein, 17 aa, Synthetic construct
KFNDQWNYRANFLKIRR

SEQ ID NO: 1185 - protein, 17 aa, Synthetic construct
ADNDQWNYRANFLKIRR

SEQ ID NO: 1186 - protein, 17 aa, Synthetic construct
DDNDQWNYRANFLKIRR

SEQ ID NO: 1187 - protein, 17 aa, Synthetic construct
KDNDQWNYRANFLKIRR

SEQ ID NO: 1188 - protein, 277 aa, Synthetic construct
MFHYVDVGPRDGTPVLFLHGNPTSSYVWRNIIPHVAPTHRCIAPDLIGMGKSDKPDLGYFFDDHVRFMDAFIEALGLEEVVLVIHDWGSALGFHWAKRNPERVKGIAFMEFIRPIPTWDEWPEFARETFQAFRTTDVGRKLIIDQNVFIEGTLPMGVVRPLTEVEMDHYREPFLNPVDREPLWRFPNELPIAGEPANIVALVEEYMDWLHQSPVPKLLFWGTPGVLIPPAEAARLAKSLPNCKAVDIGPGLNLLQEDNPDLIGSEIARWLSTLEISG

SEQ ID NO: 1189 - protein, 277 aa, Synthetic construct
MVHYVDVGPRDGTPVLFLHGNPTSSYVWRNIIPHVAPTHRCIAPDLIGMGKSDKPDLGYFFDDHVRFMDAFIEALGLEEVVLVIHDWGSALGFHWAKRNPERVKGIAFMEFIRPIPTWDEWPEFARETFQAFRTTDVGRKLIIDQNVFIEGTLPMGVVRPLTEVEMDHYREPFLNPVDREPLWRFPNELPIAGEPANIVALVEEYMDWLHQSPVPKLLFWGTPGVLIPPAEAARLAKSLPNCKAVDIGPGLNLLQEDNPDLIGSEIARWLSTLEISG

SEQ ID NO: 1190 - protein, 277 aa, Synthetic construct
MLHYVDVGPRDGTPVLFLHGNPTSSYVWRNIIPHVAPTHRCIAPDLIGMGKSDKPDLGYFFDDHVRFMDAFIEALGLEEVVLVIHDWGSALGFHWAKRNPERVKGIAFMEFIRPIPTWDEWPEFARETFQAFRTTDVGRKLIIDQNVFIEGTLPMGVVRPLTEVEMDHYREPFLNPVDREPLWRFPNELPIAGEPANIVALVEEYMDWLHQSPVPKLLFWGTPGVLIPPAEAARLAKSLPNCKAVDIGPGLNLLQEDNPDLIGSEIARWLSTLEISG

SEQ ID NO: 1191 - protein, 277 aa, Synthetic construct
MRHYVDVGPRDGTPVLFLHGNPTSSYVWRNIIPHVAPTHRCIAPDLIGMGKSDKPDLGYFFDDHVRFMDAFIEALGLEEVVLVIHDWGSALGFHWAKRNPERVKGIAFMEFIRPIPTWDEWPEFARETFQAFRTTDVGRKLIIDQNVFIEGTLPMGVVRPLTEVEMDHYREPFLNPVDREPLWRFPNELPIAGEPANIVALVEEYMDWLHQSPVPKLLFWGTPGVLIPPAEAARLAKSLPNCKAVDIGPGLNLLQEDNPDLIGSEIARWLSTLEISG

SEQ ID NO: 1192 - protein, 277 aa, Synthetic construct
MGHYVDVGPRDGTPVLFLHGNPTSSYVWRNIIPHVAPTHRCIAPDLIGMGKSDKPDLGYFFDDHVRFMDAFIEALGLEEVVLVIHDWGSALGFHWAKRNPERVKGIAFMEFIRPIPTWDEWPEFARETFQAFRTTDVGRKLIIDQNVFIEGTLPMGVVRPLTEVEMDHYREPFLNPVDREPLWRFPNELPIAGEPANIVALVEEYMDWLHQSPVPKLLFWGTPGVLIPPAEAARLAKSLPNCKAVDIGPGLNLLQEDNPDLIGSEIARWLSTLEISG

SEQ ID NO: 1193 - protein, 277 aa, Synthetic construct
MAHYVDVGPRDGTPVLFLHGNPTSSYVWRNIIPHVAPTHRCIAPDLIGMGKSDKPDLGYFFDDHVRFMDAFIEALGLEEVVLVIHDWGSALGFHWAKRNPERVKGIAFMEFIRPIPTWDEWPEFARETFQAFRTTDVGRKLIIDQNVFIEGTLPMGVVRPLTEVEMDHYREPFLNPVDREPLWRFPNELPIAGEPANIVALVEEYMDWLHQSPVPKLLFWGTPGVLIPPAEAARLAKSLPNCKAVDIGPGLNLLQEDNPDLIGSEIARWLSTLEISG

SEQ ID NO: 1194 - protein, 277 aa, Synthetic construct
MFAYVDVGPRDGTPVLFLHGNPTSSYVWRNIIPHVAPTHRCIAPDLIGMGKSDKPDLGYFFDDHVRFMDAFIEALGLEEVVLVIHDWGSALGFHWAKRNPERVKGIAFMEFIRPIPTWDEWPEFARETFQAFRTTDVGRKLIIDQNVFIEGTLPMGVVRPLTEVEMDHYREPFLNPVDREPLWRFPNELPIAGEPANIVALVEEYMDWLHQSPVPKLLFWGTPGVLIPPAEAARLAKSLPNCKAVDIGPGLNLLQEDNPDLIGSEIARWLSTLEISG

SEQ ID NO: 1195 - protein, 277 aa, Synthetic construct
MFSYVDVGPRDGTPVLFLHGNPTSSYVWRNIIPHVAPTHRCIAPDLIGMGKSDKPDLGYFFDDHVRFMDAFIEALGLEEVVLVIHDWGSALGFHWAKRNPERVKGIAFMEFIRPIPTWDEWPEFARETFQAFRTTDVGRKLIIDQNVFIEGTLPMGVVRPLTEVEMDHYREPFLNPVDREPLWRFPNELPIAGEPANIVALVEEYMDWLHQSPVPKLLFWGTPGVLIPPAEAARLAKSLPNCKAVDIGPGLNLLQEDNPDLIGSEIARWLSTLEISG

SEQ ID NO: 1196 - protein, 277 aa, Synthetic construct
MFNYVDVGPRDGTPVLFLHGNPTSSYVWRNIIPHVAPTHRCIAPDLIGMGKSDKPDLGYFFDDHVRFMDAFIEALGLEEVVLVIHDWGSALGFHWAKRNPERVKGIAFMEFIRPIPTWDEWPEFARETFQAFRTTDVGRKLIIDQNVFIEGTLPMGVVRPLTEVEMDHYREPFLNPVDREPLWRFPNELPIAGEPANIVALVEEYMDWLHQSPVPKLLFWGTPGVLIPPAEAARLAKSLPNCKAVDIGPGLNLLQEDNPDLIGSEIARWLSTLEISG

SEQ ID NO: 1197 - protein, 277 aa, Synthetic construct
MFRYVDVGPRDGTPVLFLHGNPTSSYVWRNIIPHVAPTHRCIAPDLIGMGKSDKPDLGYFFDDHVRFMDAFIEALGLEEVVLVIHDWGSALGFHWAKRNPERVKGIAFMEFIRPIPTWDEWPEFARETFQAFRTTDVGRKLIIDQNVFIEGTLPMGVVRPLTEVEMDHYREPFLNPVDREPLWRFPNELPIAGEPANIVALVEEYMDWLHQSPVPKLLFWGTPGVLIPPAEAARLAKSLPNCKAVDIGPGLNLLQEDNPDLIGSEIARWLSTLEISG

SEQ ID NO: 1198 - protein, 277 aa, Synthetic construct
MFTYVDVGPRDGTPVLFLHGNPTSSYVWRNIIPHVAPTHRCIAPDLIGMGKSDKPDLGYFFDDHVRFMDAFIEALGLEEVVLVIHDWGSALGFHWAKRNPERVKGIAFMEFIRPIPTWDEWPEFARETFQAFRTTDVGRKLIIDQNVFIEGTLPMGVVRPLTEVEMDHYREPFLNPVDREPLWRFPNELPIAGEPANIVALVEEYMDWLHQSPVPKLLFWGTPGVLIPPAEAARLAKSLPNCKAVDIGPGLNLLQEDNPDLIGSEIARWLSTLEISG

SEQ ID NO: 1199 - protein, 277 aa, Synthetic construct
MFQYVDVGPRDGTPVLFLHGNPTSSYVWRNIIPHVAPTHRCIAPDLIGMGKSDKPDLGYFFDDHVRFMDAFIEALGLEEVVLVIHDWGSALGFHWAKRNPERVKGIAFMEFIRPIPTWDEWPEFARETFQAFRTTDVGRKLIIDQNVFIEGTLPMGVVRPLTEVEMDHYREPFLNPVDREPLWRFPNELPIAGEPANIVALVEEYMDWLHQSPVPKLLFWGTPGVLIPPAEAARLAKSLPNCKAVDIGPGLNLLQEDNPDLIGSEIARWLSTLEISG

SEQ ID NO: 1200 - protein, 277 aa, Synthetic construct
MFHFVDVGPRDGTPVLFLHGNPTSSYVWRNIIPHVAPTHRCIAPDLIGMGKSDKPDLGYFFDDHVRFMDAFIEALGLEEVVLVIHDWGSALGFHWAKRNPERVKGIAFMEFIRPIPTWDEWPEFARETFQAFRTTDVGRKLIIDQNVFIEGTLPMGVVRPLTEVEMDHYREPFLNPVDREPLWRFPNELPIAGEPANIVALVEEYMDWLHQSPVPKLLFWGTPGVLIPPAEAARLAKSLPNCKAVDIGPGLNLLQEDNPDLIGSEIARWLSTLEISG

SEQ ID NO: 1201 - protein, 277 aa, Synthetic construct
MFHHVDVGPRDGTPVLFLHGNPTSSYVWRNIIPHVAPTHRCIAPDLIGMGKSDKPDLGYFFDDHVRFMDAFIEALGLEEVVLVIHDWGSALGFHWAKRNPERVKGIAFMEFIRPIPTWDEWPEFARETFQAFRTTDVGRKLIIDQNVFIEGTLPMGVVRPLTEVEMDHYREPFLNPVDREPLWRFPNELPIAGEPANIVALVEEYMDWLHQSPVPKLLFWGTPGVLIPPAEAARLAKSLPNCKAVDIGPGLNLLQEDNPDLIGSEIARWLSTLEISG

SEQ ID NO: 1202 - protein, 277 aa, Synthetic construct
MFHVVDVGPRDGTPVLFLHGNPTSSYVWRNIIPHVAPTHRCIAPDLIGMGKSDKPDLGYFFDDHVRFMDAFIEALGLEEVVLVIHDWGSALGFHWAKRNPERVKGIAFMEFIRPIPTWDEWPEFARETFQAFRTTDVGRKLIIDQNVFIEGTLPMGVVRPLTEVEMDHYREPFLNPVDREPLWRFPNELPIAGEPANIVALVEEYMDWLHQSPVPKLLFWGTPGVLIPPAEAARLAKSLPNCKAVDIGPGLNLLQEDNPDLIGSEIARWLSTLEISG

SEQ ID NO: 1203 - protein, 277 aa, Synthetic construct
MFHCVDVGPRDGTPVLFLHGNPTSSYVWRNIIPHVAPTHRCIAPDLIGMGKSDKPDLGYFFDDHVRFMDAFIEALGLEEVVLVIHDWGSALGFHWAKRNPERVKGIAFMEFIRPIPTWDEWPEFARETFQAFRTTDVGRKLIIDQNVFIEGTLPMGVVRPLTEVEMDHYREPFLNPVDREPLWRFPNELPIAGEPANIVALVEEYMDWLHQSPVPKLLFWGTPGVLIPPAEAARLAKSLPNCKAVDIGPGLNLLQEDNPDLIGSEIARWLSTLEISG

SEQ ID NO: 1204 - protein, 277 aa, Synthetic construct
MFHLVDVGPRDGTPVLFLHGNPTSSYVWRNIIPHVAPTHRCIAPDLIGMGKSDKPDLGYFFDDHVRFMDAFIEALGLEEVVLVIHDWGSALGFHWAKRNPERVKGIAFMEFIRPIPTWDEWPEFARETFQAFRTTDVGRKLIIDQNVFIEGTLPMGVVRPLTEVEMDHYREPFLNPVDREPLWRFPNELPIAGEPANIVALVEEYMDWLHQSPVPKLLFWGTPGVLIPPAEAARLAKSLPNCKAVDIGPGLNLLQEDNPDLIGSEIARWLSTLEISG

SEQ ID NO: 1205 - protein, 277 aa, Synthetic construct
MFHWVDVGPRDGTPVLFLHGNPTSSYVWRNIIPHVAPTHRCIAPDLIGMGKSDKPDLGYFFDDHVRFMDAFIEALGLEEVVLVIHDWGSALGFHWAKRNPERVKGIAFMEFIRPIPTWDEWPEFARETFQAFRTTDVGRKLIIDQNVFIEGTLPMGVVRPLTEVEMDHYREPFLNPVDREPLWRFPNELPIAGEPANIVALVEEYMDWLHQSPVPKLLFWGTPGVLIPPAEAARLAKSLPNCKAVDIGPGLNLLQEDNPDLIGSEIARWLSTLEISG

SEQ ID NO: 1206 - protein, 277 aa, Synthetic construct
MFHYIDVGPRDGTPVLFLHGNPTSSYVWRNIIPHVAPTHRCIAPDLIGMGKSDKPDLGYFFDDHVRFMDAFIEALGLEEVVLVIHDWGSALGFHWAKRNPERVKGIAFMEFIRPIPTWDEWPEFARETFQAFRTTDVGRKLIIDQNVFIEGTLPMGVVRPLTEVEMDHYREPFLNPVDREPLWRFPNELPIAGEPANIVALVEEYMDWLHQSPVPKLLFWGTPGVLIPPAEAARLAKSLPNCKAVDIGPGLNLLQEDNPDLIGSEIARWLSTLEISG

SEQ ID NO: 1207 - protein, 277 aa, Synthetic construct
MFHYLDVGPRDGTPVLFLHGNPTSSYVWRNIIPHVAPTHRCIAPDLIGMGKSDKPDLGYFFDDHVRFMDAFIEALGLEEVVLVIHDWGSALGFHWAKRNPERVKGIAFMEFIRPIPTWDEWPEFARETFQAFRTTDVGRKLIIDQNVFIEGTLPMGVVRPLTEVEMDHYREPFLNPVDREPLWRFPNELPIAGEPANIVALVEEYMDWLHQSPVPKLLFWGTPGVLIPPAEAARLAKSLPNCKAVDIGPGLNLLQEDNPDLIGSEIARWLSTLEISG

SEQ ID NO: 1208 - protein, 277 aa, Synthetic construct
MFHYRDVGPRDGTPVLFLHGNPTSSYVWRNIIPHVAPTHRCIAPDLIGMGKSDKPDLGYFFDDHVRFMDAFIEALGLEEVVLVIHDWGSALGFHWAKRNPERVKGIAFMEFIRPIPTWDEWPEFARETFQAFRTTDVGRKLIIDQNVFIEGTLPMGVVRPLTEVEMDHYREPFLNPVDREPLWRFPNELPIAGEPANIVALVEEYMDWLHQSPVPKLLFWGTPGVLIPPAEAARLAKSLPNCKAVDIGPGLNLLQEDNPDLIGSEIARWLSTLEISG

SEQ ID NO: 1209 - protein, 277 aa, Synthetic construct
MFHYTDVGPRDGTPVLFLHGNPTSSYVWRNIIPHVAPTHRCIAPDLIGMGKSDKPDLGYFFDDHVRFMDAFIEALGLEEVVLVIHDWGSALGFHWAKRNPERVKGIAFMEFIRPIPTWDEWPEFARETFQAFRTTDVGRKLIIDQNVFIEGTLPMGVVRPLTEVEMDHYREPFLNPVDREPLWRFPNELPIAGEPANIVALVEEYMDWLHQSPVPKLLFWGTPGVLIPPAEAARLAKSLPNCKAVDIGPGLNLLQEDNPDLIGSEIARWLSTLEISG

SEQ ID NO: 1210 - protein, 277 aa, Synthetic construct
MFHYEDVGPRDGTPVLFLHGNPTSSYVWRNIIPHVAPTHRCIAPDLIGMGKSDKPDLGYFFDDHVRFMDAFIEALGLEEVVLVIHDWGSALGFHWAKRNPERVKGIAFMEFIRPIPTWDEWPEFARETFQAFRTTDVGRKLIIDQNVFIEGTLPMGVVRPLTEVEMDHYREPFLNPVDREPLWRFPNELPIAGEPANIVALVEEYMDWLHQSPVPKLLFWGTPGVLIPPAEAARLAKSLPNCKAVDIGPGLNLLQEDNPDLIGSEIARWLSTLEISG

SEQ ID NO: 1211 - protein, 277 aa, Synthetic construct
MFHYHDVGPRDGTPVLFLHGNPTSSYVWRNIIPHVAPTHRCIAPDLIGMGKSDKPDLGYFFDDHVRFMDAFIEALGLEEVVLVIHDWGSALGFHWAKRNPERVKGIAFMEFIRPIPTWDEWPEFARETFQAFRTTDVGRKLIIDQNVFIEGTLPMGVVRPLTEVEMDHYREPFLNPVDREPLWRFPNELPIAGEPANIVALVEEYMDWLHQSPVPKLLFWGTPGVLIPPAEAARLAKSLPNCKAVDIGPGLNLLQEDNPDLIGSEIARWLSTLEISG

SEQ ID NO: 1212 - protein, 277 aa, Synthetic construct
MFHYVEVGPRDGTPVLFLHGNPTSSYVWRNIIPHVAPTHRCIAPDLIGMGKSDKPDLGYFFDDHVRFMDAFIEALGLEEVVLVIHDWGSALGFHWAKRNPERVKGIAFMEFIRPIPTWDEWPEFARETFQAFRTTDVGRKLIIDQNVFIEGTLPMGVVRPLTEVEMDHYREPFLNPVDREPLWRFPNELPIAGEPANIVALVEEYMDWLHQSPVPKLLFWGTPGVLIPPAEAARLAKSLPNCKAVDIGPGLNLLQEDNPDLIGSEIARWLSTLEISG

SEQ ID NO: 1213 - protein, 277 aa, Synthetic construct
MFHYVAVGPRDGTPVLFLHGNPTSSYVWRNIIPHVAPTHRCIAPDLIGMGKSDKPDLGYFFDDHVRFMDAFIEALGLEEVVLVIHDWGSALGFHWAKRNPERVKGIAFMEFIRPIPTWDEWPEFARETFQAFRTTDVGRKLIIDQNVFIEGTLPMGVVRPLTEVEMDHYREPFLNPVDREPLWRFPNELPIAGEPANIVALVEEYMDWLHQSPVPKLLFWGTPGVLIPPAEAARLAKSLPNCKAVDIGPGLNLLQEDNPDLIGSEIARWLSTLEISG

SEQ ID NO: 1214 - protein, 277 aa, Synthetic construct
MFHYVSVGPRDGTPVLFLHGNPTSSYVWRNIIPHVAPTHRCIAPDLIGMGKSDKPDLGYFFDDHVRFMDAFIEALGLEEVVLVIHDWGSALGFHWAKRNPERVKGIAFMEFIRPIPTWDEWPEFARETFQAFRTTDVGRKLIIDQNVFIEGTLPMGVVRPLTEVEMDHYREPFLNPVDREPLWRFPNELPIAGEPANIVALVEEYMDWLHQSPVPKLLFWGTPGVLIPPAEAARLAKSLPNCKAVDIGPGLNLLQEDNPDLIGSEIARWLSTLEISG

SEQ ID NO: 1215 - protein, 277 aa, Synthetic construct
MFHYVQVGPRDGTPVLFLHGNPTSSYVWRNIIPHVAPTHRCIAPDLIGMGKSDKPDLGYFFDDHVRFMDAFIEALGLEEVVLVIHDWGSALGFHWAKRNPERVKGIAFMEFIRPIPTWDEWPEFARETFQAFRTTDVGRKLIIDQNVFIEGTLPMGVVRPLTEVEMDHYREPFLNPVDREPLWRFPNELPIAGEPANIVALVEEYMDWLHQSPVPKLLFWGTPGVLIPPAEAARLAKSLPNCKAVDIGPGLNLLQEDNPDLIGSEIARWLSTLEISG

SEQ ID NO: 1216 - protein, 277 aa, Synthetic construct
MFHYVTVGPRDGTPVLFLHGNPTSSYVWRNIIPHVAPTHRCIAPDLIGMGKSDKPDLGYFFDDHVRFMDAFIEALGLEEVVLVIHDWGSALGFHWAKRNPERVKGIAFMEFIRPIPTWDEWPEFARETFQAFRTTDVGRKLIIDQNVFIEGTLPMGVVRPLTEVEMDHYREPFLNPVDREPLWRFPNELPIAGEPANIVALVEEYMDWLHQSPVPKLLFWGTPGVLIPPAEAARLAKSLPNCKAVDIGPGLNLLQEDNPDLIGSEIARWLSTLEISG

SEQ ID NO: 1217 - protein, 277 aa, Synthetic construct
MFHYVNVGPRDGTPVLFLHGNPTSSYVWRNIIPHVAPTHRCIAPDLIGMGKSDKPDLGYFFDDHVRFMDAFIEALGLEEVVLVIHDWGSALGFHWAKRNPERVKGIAFMEFIRPIPTWDEWPEFARETFQAFRTTDVGRKLIIDQNVFIEGTLPMGVVRPLTEVEMDHYREPFLNPVDREPLWRFPNELPIAGEPANIVALVEEYMDWLHQSPVPKLLFWGTPGVLIPPAEAARLAKSLPNCKAVDIGPGLNLLQEDNPDLIGSEIARWLSTLEISG

SEQ ID NO: 1218 - protein, 277 aa, Synthetic construct
MFHYVDEGPRDGTPVLFLHGNPTSSYVWRNIIPHVAPTHRCIAPDLIGMGKSDKPDLGYFFDDHVRFMDAFIEALGLEEVVLVIHDWGSALGFHWAKRNPERVKGIAFMEFIRPIPTWDEWPEFARETFQAFRTTDVGRKLIIDQNVFIEGTLPMGVVRPLTEVEMDHYREPFLNPVDREPLWRFPNELPIAGEPANIVALVEEYMDWLHQSPVPKLLFWGTPGVLIPPAEAARLAKSLPNCKAVDIGPGLNLLQEDNPDLIGSEIARWLSTLEISG

SEQ ID NO: 1219 - protein, 277 aa, Synthetic construct
MFHYVDTGPRDGTPVLFLHGNPTSSYVWRNIIPHVAPTHRCIAPDLIGMGKSDKPDLGYFFDDHVRFMDAFIEALGLEEVVLVIHDWGSALGFHWAKRNPERVKGIAFMEFIRPIPTWDEWPEFARETFQAFRTTDVGRKLIIDQNVFIEGTLPMGVVRPLTEVEMDHYREPFLNPVDREPLWRFPNELPIAGEPANIVALVEEYMDWLHQSPVPKLLFWGTPGVLIPPAEAARLAKSLPNCKAVDIGPGLNLLQEDNPDLIGSEIARWLSTLEISG

SEQ ID NO: 1220 - protein, 277 aa, Synthetic construct
MFHYVDAGPRDGTPVLFLHGNPTSSYVWRNIIPHVAPTHRCIAPDLIGMGKSDKPDLGYFFDDHVRFMDAFIEALGLEEVVLVIHDWGSALGFHWAKRNPERVKGIAFMEFIRPIPTWDEWPEFARETFQAFRTTDVGRKLIIDQNVFIEGTLPMGVVRPLTEVEMDHYREPFLNPVDREPLWRFPNELPIAGEPANIVALVEEYMDWLHQSPVPKLLFWGTPGVLIPPAEAARLAKSLPNCKAVDIGPGLNLLQEDNPDLIGSEIARWLSTLEISG

SEQ ID NO: 1221 - protein, 277 aa, Synthetic construct
MFHYVDSGPRDGTPVLFLHGNPTSSYVWRNIIPHVAPTHRCIAPDLIGMGKSDKPDLGYFFDDHVRFMDAFIEALGLEEVVLVIHDWGSALGFHWAKRNPERVKGIAFMEFIRPIPTWDEWPEFARETFQAFRTTDVGRKLIIDQNVFIEGTLPMGVVRPLTEVEMDHYREPFLNPVDREPLWRFPNELPIAGEPANIVALVEEYMDWLHQSPVPKLLFWGTPGVLIPPAEAARLAKSLPNCKAVDIGPGLNLLQEDNPDLIGSEIARWLSTLEISG

SEQ ID NO: 1222 - protein, 277 aa, Synthetic construct
MFHYVDQGPRDGTPVLFLHGNPTSSYVWRNIIPHVAPTHRCIAPDLIGMGKSDKPDLGYFFDDHVRFMDAFIEALGLEEVVLVIHDWGSALGFHWAKRNPERVKGIAFMEFIRPIPTWDEWPEFARETFQAFRTTDVGRKLIIDQNVFIEGTLPMGVVRPLTEVEMDHYREPFLNPVDREPLWRFPNELPIAGEPANIVALVEEYMDWLHQSPVPKLLFWGTPGVLIPPAEAARLAKSLPNCKAVDIGPGLNLLQEDNPDLIGSEIARWLSTLEISG

SEQ ID NO: 1223 - protein, 277 aa, Synthetic construct
MFHYVDDGPRDGTPVLFLHGNPTSSYVWRNIIPHVAPTHRCIAPDLIGMGKSDKPDLGYFFDDHVRFMDAFIEALGLEEVVLVIHDWGSALGFHWAKRNPERVKGIAFMEFIRPIPTWDEWPEFARETFQAFRTTDVGRKLIIDQNVFIEGTLPMGVVRPLTEVEMDHYREPFLNPVDREPLWRFPNELPIAGEPANIVALVEEYMDWLHQSPVPKLLFWGTPGVLIPPAEAARLAKSLPNCKAVDIGPGLNLLQEDNPDLIGSEIARWLSTLEISG

SEQ ID NO: 1224 - protein, 277 aa, Synthetic construct
MFHYVDVAPRDGTPVLFLHGNPTSSYVWRNIIPHVAPTHRCIAPDLIGMGKSDKPDLGYFFDDHVRFMDAFIEALGLEEVVLVIHDWGSALGFHWAKRNPERVKGIAFMEFIRPIPTWDEWPEFARETFQAFRTTDVGRKLIIDQNVFIEGTLPMGVVRPLTEVEMDHYREPFLNPVDREPLWRFPNELPIAGEPANIVALVEEYMDWLHQSPVPKLLFWGTPGVLIPPAEAARLAKSLPNCKAVDIGPGLNLLQEDNPDLIGSEIARWLSTLEISG

SEQ ID NO: 1225 - protein, 277 aa, Synthetic construct
MFHYVDVDPRDGTPVLFLHGNPTSSYVWRNIIPHVAPTHRCIAPDLIGMGKSDKPDLGYFFDDHVRFMDAFIEALGLEEVVLVIHDWGSALGFHWAKRNPERVKGIAFMEFIRPIPTWDEWPEFARETFQAFRTTDVGRKLIIDQNVFIEGTLPMGVVRPLTEVEMDHYREPFLNPVDREPLWRFPNELPIAGEPANIVALVEEYMDWLHQSPVPKLLFWGTPGVLIPPAEAARLAKSLPNCKAVDIGPGLNLLQEDNPDLIGSEIARWLSTLEISG

SEQ ID NO: 1226 - protein, 277 aa, Synthetic construct
MFHYVDVNPRDGTPVLFLHGNPTSSYVWRNIIPHVAPTHRCIAPDLIGMGKSDKPDLGYFFDDHVRFMDAFIEALGLEEVVLVIHDWGSALGFHWAKRNPERVKGIAFMEFIRPIPTWDEWPEFARETFQAFRTTDVGRKLIIDQNVFIEGTLPMGVVRPLTEVEMDHYREPFLNPVDREPLWRFPNELPIAGEPANIVALVEEYMDWLHQSPVPKLLFWGTPGVLIPPAEAARLAKSLPNCKAVDIGPGLNLLQEDNPDLIGSEIARWLSTLEISG

SEQ ID NO: 1227 - protein, 277 aa, Synthetic construct
MFHYVDVEPRDGTPVLFLHGNPTSSYVWRNIIPHVAPTHRCIAPDLIGMGKSDKPDLGYFFDDHVRFMDAFIEALGLEEVVLVIHDWGSALGFHWAKRNPERVKGIAFMEFIRPIPTWDEWPEFARETFQAFRTTDVGRKLIIDQNVFIEGTLPMGVVRPLTEVEMDHYREPFLNPVDREPLWRFPNELPIAGEPANIVALVEEYMDWLHQSPVPKLLFWGTPGVLIPPAEAARLAKSLPNCKAVDIGPGLNLLQEDNPDLIGSEIARWLSTLEISG

SEQ ID NO: 1228 - protein, 277 aa, Synthetic construct
MFHYVDVSPRDGTPVLFLHGNPTSSYVWRNIIPHVAPTHRCIAPDLIGMGKSDKPDLGYFFDDHVRFMDAFIEALGLEEVVLVIHDWGSALGFHWAKRNPERVKGIAFMEFIRPIPTWDEWPEFARETFQAFRTTDVGRKLIIDQNVFIEGTLPMGVVRPLTEVEMDHYREPFLNPVDREPLWRFPNELPIAGEPANIVALVEEYMDWLHQSPVPKLLFWGTPGVLIPPAEAARLAKSLPNCKAVDIGPGLNLLQEDNPDLIGSEIARWLSTLEISG

SEQ ID NO: 1229 - protein, 277 aa, Synthetic construct
MFHYVDVRPRDGTPVLFLHGNPTSSYVWRNIIPHVAPTHRCIAPDLIGMGKSDKPDLGYFFDDHVRFMDAFIEALGLEEVVLVIHDWGSALGFHWAKRNPERVKGIAFMEFIRPIPTWDEWPEFARETFQAFRTTDVGRKLIIDQNVFIEGTLPMGVVRPLTEVEMDHYREPFLNPVDREPLWRFPNELPIAGEPANIVALVEEYMDWLHQSPVPKLLFWGTPGVLIPPAEAARLAKSLPNCKAVDIGPGLNLLQEDNPDLIGSEIARWLSTLEISG

SEQ ID NO: 1230 - protein, 277 aa, Synthetic construct
MFHYVDVGARDGTPVLFLHGNPTSSYVWRNIIPHVAPTHRCIAPDLIGMGKSDKPDLGYFFDDHVRFMDAFIEALGLEEVVLVIHDWGSALGFHWAKRNPERVKGIAFMEFIRPIPTWDEWPEFARETFQAFRTTDVGRKLIIDQNVFIEGTLPMGVVRPLTEVEMDHYREPFLNPVDREPLWRFPNELPIAGEPANIVALVEEYMDWLHQSPVPKLLFWGTPGVLIPPAEAARLAKSLPNCKAVDIGPGLNLLQEDNPDLIGSEIARWLSTLEISG

SEQ ID NO: 1231 - protein, 277 aa, Synthetic construct
MFHYVDVGSRDGTPVLFLHGNPTSSYVWRNIIPHVAPTHRCIAPDLIGMGKSDKPDLGYFFDDHVRFMDAFIEALGLEEVVLVIHDWGSALGFHWAKRNPERVKGIAFMEFIRPIPTWDEWPEFARETFQAFRTTDVGRKLIIDQNVFIEGTLPMGVVRPLTEVEMDHYREPFLNPVDREPLWRFPNELPIAGEPANIVALVEEYMDWLHQSPVPKLLFWGTPGVLIPPAEAARLAKSLPNCKAVDIGPGLNLLQEDNPDLIGSEIARWLSTLEISG

SEQ ID NO: 1232 - protein, 277 aa, Synthetic construct
MFHYVDVGERDGTPVLFLHGNPTSSYVWRNIIPHVAPTHRCIAPDLIGMGKSDKPDLGYFFDDHVRFMDAFIEALGLEEVVLVIHDWGSALGFHWAKRNPERVKGIAFMEFIRPIPTWDEWPEFARETFQAFRTTDVGRKLIIDQNVFIEGTLPMGVVRPLTEVEMDHYREPFLNPVDREPLWRFPNELPIAGEPANIVALVEEYMDWLHQSPVPKLLFWGTPGVLIPPAEAARLAKSLPNCKAVDIGPGLNLLQEDNPDLIGSEIARWLSTLEISG

SEQ ID NO: 1233 - protein, 277 aa, Synthetic construct
MFHYVDVGDRDGTPVLFLHGNPTSSYVWRNIIPHVAPTHRCIAPDLIGMGKSDKPDLGYFFDDHVRFMDAFIEALGLEEVVLVIHDWGSALGFHWAKRNPERVKGIAFMEFIRPIPTWDEWPEFARETFQAFRTTDVGRKLIIDQNVFIEGTLPMGVVRPLTEVEMDHYREPFLNPVDREPLWRFPNELPIAGEPANIVALVEEYMDWLHQSPVPKLLFWGTPGVLIPPAEAARLAKSLPNCKAVDIGPGLNLLQEDNPDLIGSEIARWLSTLEISG

SEQ ID NO: 1234 - protein, 277 aa, Synthetic construct
MFHYVDVGNRDGTPVLFLHGNPTSSYVWRNIIPHVAPTHRCIAPDLIGMGKSDKPDLGYFFDDHVRFMDAFIEALGLEEVVLVIHDWGSALGFHWAKRNPERVKGIAFMEFIRPIPTWDEWPEFARETFQAFRTTDVGRKLIIDQNVFIEGTLPMGVVRPLTEVEMDHYREPFLNPVDREPLWRFPNELPIAGEPANIVALVEEYMDWLHQSPVPKLLFWGTPGVLIPPAEAARLAKSLPNCKAVDIGPGLNLLQEDNPDLIGSEIARWLSTLEISG

SEQ ID NO: 1235 - protein, 277 aa, Synthetic construct
MFHYVDVGRRDGTPVLFLHGNPTSSYVWRNIIPHVAPTHRCIAPDLIGMGKSDKPDLGYFFDDHVRFMDAFIEALGLEEVVLVIHDWGSALGFHWAKRNPERVKGIAFMEFIRPIPTWDEWPEFARETFQAFRTTDVGRKLIIDQNVFIEGTLPMGVVRPLTEVEMDHYREPFLNPVDREPLWRFPNELPIAGEPANIVALVEEYMDWLHQSPVPKLLFWGTPGVLIPPAEAARLAKSLPNCKAVDIGPGLNLLQEDNPDLIGSEIARWLSTLEISG

SEQ ID NO: 1236 - protein, 277 aa, Synthetic construct
MFHYVDVGPKDGTPVLFLHGNPTSSYVWRNIIPHVAPTHRCIAPDLIGMGKSDKPDLGYFFDDHVRFMDAFIEALGLEEVVLVIHDWGSALGFHWAKRNPERVKGIAFMEFIRPIPTWDEWPEFARETFQAFRTTDVGRKLIIDQNVFIEGTLPMGVVRPLTEVEMDHYREPFLNPVDREPLWRFPNELPIAGEPANIVALVEEYMDWLHQSPVPKLLFWGTPGVLIPPAEAARLAKSLPNCKAVDIGPGLNLLQEDNPDLIGSEIARWLSTLEISG

SEQ ID NO: 1237 - protein, 277 aa, Synthetic construct
MFHYVDVGPADGTPVLFLHGNPTSSYVWRNIIPHVAPTHRCIAPDLIGMGKSDKPDLGYFFDDHVRFMDAFIEALGLEEVVLVIHDWGSALGFHWAKRNPERVKGIAFMEFIRPIPTWDEWPEFARETFQAFRTTDVGRKLIIDQNVFIEGTLPMGVVRPLTEVEMDHYREPFLNPVDREPLWRFPNELPIAGEPANIVALVEEYMDWLHQSPVPKLLFWGTPGVLIPPAEAARLAKSLPNCKAVDIGPGLNLLQEDNPDLIGSEIARWLSTLEISG

SEQ ID NO: 1238 - protein, 277 aa, Synthetic construct
MFHYVDVGPSDGTPVLFLHGNPTSSYVWRNIIPHVAPTHRCIAPDLIGMGKSDKPDLGYFFDDHVRFMDAFIEALGLEEVVLVIHDWGSALGFHWAKRNPERVKGIAFMEFIRPIPTWDEWPEFARETFQAFRTTDVGRKLIIDQNVFIEGTLPMGVVRPLTEVEMDHYREPFLNPVDREPLWRFPNELPIAGEPANIVALVEEYMDWLHQSPVPKLLFWGTPGVLIPPAEAARLAKSLPNCKAVDIGPGLNLLQEDNPDLIGSEIARWLSTLEISG

SEQ ID NO: 1239 - protein, 277 aa, Synthetic construct
MFHYVDVGPEDGTPVLFLHGNPTSSYVWRNIIPHVAPTHRCIAPDLIGMGKSDKPDLGYFFDDHVRFMDAFIEALGLEEVVLVIHDWGSALGFHWAKRNPERVKGIAFMEFIRPIPTWDEWPEFARETFQAFRTTDVGRKLIIDQNVFIEGTLPMGVVRPLTEVEMDHYREPFLNPVDREPLWRFPNELPIAGEPANIVALVEEYMDWLHQSPVPKLLFWGTPGVLIPPAEAARLAKSLPNCKAVDIGPGLNLLQEDNPDLIGSEIARWLSTLEISG

SEQ ID NO: 1240 - protein, 277 aa, Synthetic construct
MFHYVDVGPTDGTPVLFLHGNPTSSYVWRNIIPHVAPTHRCIAPDLIGMGKSDKPDLGYFFDDHVRFMDAFIEALGLEEVVLVIHDWGSALGFHWAKRNPERVKGIAFMEFIRPIPTWDEWPEFARETFQAFRTTDVGRKLIIDQNVFIEGTLPMGVVRPLTEVEMDHYREPFLNPVDREPLWRFPNELPIAGEPANIVALVEEYMDWLHQSPVPKLLFWGTPGVLIPPAEAARLAKSLPNCKAVDIGPGLNLLQEDNPDLIGSEIARWLSTLEISG

SEQ ID NO: 1241 - protein, 277 aa, Synthetic construct
MFHYVDVGPQDGTPVLFLHGNPTSSYVWRNIIPHVAPTHRCIAPDLIGMGKSDKPDLGYFFDDHVRFMDAFIEALGLEEVVLVIHDWGSALGFHWAKRNPERVKGIAFMEFIRPIPTWDEWPEFARETFQAFRTTDVGRKLIIDQNVFIEGTLPMGVVRPLTEVEMDHYREPFLNPVDREPLWRFPNELPIAGEPANIVALVEEYMDWLHQSPVPKLLFWGTPGVLIPPAEAARLAKSLPNCKAVDIGPGLNLLQEDNPDLIGSEIARWLSTLEISG

SEQ ID NO: 1242 - protein, 277 aa, Synthetic construct
MFHYVDVGPREGTPVLFLHGNPTSSYVWRNIIPHVAPTHRCIAPDLIGMGKSDKPDLGYFFDDHVRFMDAFIEALGLEEVVLVIHDWGSALGFHWAKRNPERVKGIAFMEFIRPIPTWDEWPEFARETFQAFRTTDVGRKLIIDQNVFIEGTLPMGVVRPLTEVEMDHYREPFLNPVDREPLWRFPNELPIAGEPANIVALVEEYMDWLHQSPVPKLLFWGTPGVLIPPAEAARLAKSLPNCKAVDIGPGLNLLQEDNPDLIGSEIARWLSTLEISG

SEQ ID NO: 1243 - protein, 277 aa, Synthetic construct
MFHYVDVGPRNGTPVLFLHGNPTSSYVWRNIIPHVAPTHRCIAPDLIGMGKSDKPDLGYFFDDHVRFMDAFIEALGLEEVVLVIHDWGSALGFHWAKRNPERVKGIAFMEFIRPIPTWDEWPEFARETFQAFRTTDVGRKLIIDQNVFIEGTLPMGVVRPLTEVEMDHYREPFLNPVDREPLWRFPNELPIAGEPANIVALVEEYMDWLHQSPVPKLLFWGTPGVLIPPAEAARLAKSLPNCKAVDIGPGLNLLQEDNPDLIGSEIARWLSTLEISG

SEQ ID NO: 1244 - protein, 277 aa, Synthetic construct
MFHYVDVGPRGGTPVLFLHGNPTSSYVWRNIIPHVAPTHRCIAPDLIGMGKSDKPDLGYFFDDHVRFMDAFIEALGLEEVVLVIHDWGSALGFHWAKRNPERVKGIAFMEFIRPIPTWDEWPEFARETFQAFRTTDVGRKLIIDQNVFIEGTLPMGVVRPLTEVEMDHYREPFLNPVDREPLWRFPNELPIAGEPANIVALVEEYMDWLHQSPVPKLLFWGTPGVLIPPAEAARLAKSLPNCKAVDIGPGLNLLQEDNPDLIGSEIARWLSTLEISG

SEQ ID NO: 1245 - protein, 277 aa, Synthetic construct
MFHYVDVGPRSGTPVLFLHGNPTSSYVWRNIIPHVAPTHRCIAPDLIGMGKSDKPDLGYFFDDHVRFMDAFIEALGLEEVVLVIHDWGSALGFHWAKRNPERVKGIAFMEFIRPIPTWDEWPEFARETFQAFRTTDVGRKLIIDQNVFIEGTLPMGVVRPLTEVEMDHYREPFLNPVDREPLWRFPNELPIAGEPANIVALVEEYMDWLHQSPVPKLLFWGTPGVLIPPAEAARLAKSLPNCKAVDIGPGLNLLQEDNPDLIGSEIARWLSTLEISG

SEQ ID NO: 1246 - protein, 277 aa, Synthetic construct
MFHYVDVGPRTGTPVLFLHGNPTSSYVWRNIIPHVAPTHRCIAPDLIGMGKSDKPDLGYFFDDHVRFMDAFIEALGLEEVVLVIHDWGSALGFHWAKRNPERVKGIAFMEFIRPIPTWDEWPEFARETFQAFRTTDVGRKLIIDQNVFIEGTLPMGVVRPLTEVEMDHYREPFLNPVDREPLWRFPNELPIAGEPANIVALVEEYMDWLHQSPVPKLLFWGTPGVLIPPAEAARLAKSLPNCKAVDIGPGLNLLQEDNPDLIGSEIARWLSTLEISG

SEQ ID NO: 1247 - protein, 277 aa, Synthetic construct
MFHYVDVGPRAGTPVLFLHGNPTSSYVWRNIIPHVAPTHRCIAPDLIGMGKSDKPDLGYFFDDHVRFMDAFIEALGLEEVVLVIHDWGSALGFHWAKRNPERVKGIAFMEFIRPIPTWDEWPEFARETFQAFRTTDVGRKLIIDQNVFIEGTLPMGVVRPLTEVEMDHYREPFLNPVDREPLWRFPNELPIAGEPANIVALVEEYMDWLHQSPVPKLLFWGTPGVLIPPAEAARLAKSLPNCKAVDIGPGLNLLQEDNPDLIGSEIARWLSTLEISG

SEQ ID NO: 1248 - protein, 277 aa, Synthetic construct
MFHYVDVGPRDATPVLFLHGNPTSSYVWRNIIPHVAPTHRCIAPDLIGMGKSDKPDLGYFFDDHVRFMDAFIEALGLEEVVLVIHDWGSALGFHWAKRNPERVKGIAFMEFIRPIPTWDEWPEFARETFQAFRTTDVGRKLIIDQNVFIEGTLPMGVVRPLTEVEMDHYREPFLNPVDREPLWRFPNELPIAGEPANIVALVEEYMDWLHQSPVPKLLFWGTPGVLIPPAEAARLAKSLPNCKAVDIGPGLNLLQEDNPDLIGSEIARWLSTLEISG

SEQ ID NO: 1249 - protein, 277 aa, Synthetic construct
MFHYVDVGPRDSTPVLFLHGNPTSSYVWRNIIPHVAPTHRCIAPDLIGMGKSDKPDLGYFFDDHVRFMDAFIEALGLEEVVLVIHDWGSALGFHWAKRNPERVKGIAFMEFIRPIPTWDEWPEFARETFQAFRTTDVGRKLIIDQNVFIEGTLPMGVVRPLTEVEMDHYREPFLNPVDREPLWRFPNELPIAGEPANIVALVEEYMDWLHQSPVPKLLFWGTPGVLIPPAEAARLAKSLPNCKAVDIGPGLNLLQEDNPDLIGSEIARWLSTLEISG

SEQ ID NO: 1250 - protein, 277 aa, Synthetic construct
MFHYVDVGPRDKTPVLFLHGNPTSSYVWRNIIPHVAPTHRCIAPDLIGMGKSDKPDLGYFFDDHVRFMDAFIEALGLEEVVLVIHDWGSALGFHWAKRNPERVKGIAFMEFIRPIPTWDEWPEFARETFQAFRTTDVGRKLIIDQNVFIEGTLPMGVVRPLTEVEMDHYREPFLNPVDREPLWRFPNELPIAGEPANIVALVEEYMDWLHQSPVPKLLFWGTPGVLIPPAEAARLAKSLPNCKAVDIGPGLNLLQEDNPDLIGSEIARWLSTLEISG

SEQ ID NO: 1251 - protein, 277 aa, Synthetic construct
MFHYVDVGPRDRTPVLFLHGNPTSSYVWRNIIPHVAPTHRCIAPDLIGMGKSDKPDLGYFFDDHVRFMDAFIEALGLEEVVLVIHDWGSALGFHWAKRNPERVKGIAFMEFIRPIPTWDEWPEFARETFQAFRTTDVGRKLIIDQNVFIEGTLPMGVVRPLTEVEMDHYREPFLNPVDREPLWRFPNELPIAGEPANIVALVEEYMDWLHQSPVPKLLFWGTPGVLIPPAEAARLAKSLPNCKAVDIGPGLNLLQEDNPDLIGSEIARWLSTLEISG

SEQ ID NO: 1252 - protein, 277 aa, Synthetic construct
MFHYVDVGPRDTTPVLFLHGNPTSSYVWRNIIPHVAPTHRCIAPDLIGMGKSDKPDLGYFFDDHVRFMDAFIEALGLEEVVLVIHDWGSALGFHWAKRNPERVKGIAFMEFIRPIPTWDEWPEFARETFQAFRTTDVGRKLIIDQNVFIEGTLPMGVVRPLTEVEMDHYREPFLNPVDREPLWRFPNELPIAGEPANIVALVEEYMDWLHQSPVPKLLFWGTPGVLIPPAEAARLAKSLPNCKAVDIGPGLNLLQEDNPDLIGSEIARWLSTLEISG

SEQ ID NO: 1253 - protein, 277 aa, Synthetic construct
MFHYVDVGPRDQTPVLFLHGNPTSSYVWRNIIPHVAPTHRCIAPDLIGMGKSDKPDLGYFFDDHVRFMDAFIEALGLEEVVLVIHDWGSALGFHWAKRNPERVKGIAFMEFIRPIPTWDEWPEFARETFQAFRTTDVGRKLIIDQNVFIEGTLPMGVVRPLTEVEMDHYREPFLNPVDREPLWRFPNELPIAGEPANIVALVEEYMDWLHQSPVPKLLFWGTPGVLIPPAEAARLAKSLPNCKAVDIGPGLNLLQEDNPDLIGSEIARWLSTLEISG

SEQ ID NO: 1254 - protein, 277 aa, Synthetic construct
MFHYVDVGPRDGLPVLFLHGNPTSSYVWRNIIPHVAPTHRCIAPDLIGMGKSDKPDLGYFFDDHVRFMDAFIEALGLEEVVLVIHDWGSALGFHWAKRNPERVKGIAFMEFIRPIPTWDEWPEFARETFQAFRTTDVGRKLIIDQNVFIEGTLPMGVVRPLTEVEMDHYREPFLNPVDREPLWRFPNELPIAGEPANIVALVEEYMDWLHQSPVPKLLFWGTPGVLIPPAEAARLAKSLPNCKAVDIGPGLNLLQEDNPDLIGSEIARWLSTLEISG

SEQ ID NO: 1255 - protein, 277 aa, Synthetic construct
MFHYVDVGPRDGVPVLFLHGNPTSSYVWRNIIPHVAPTHRCIAPDLIGMGKSDKPDLGYFFDDHVRFMDAFIEALGLEEVVLVIHDWGSALGFHWAKRNPERVKGIAFMEFIRPIPTWDEWPEFARETFQAFRTTDVGRKLIIDQNVFIEGTLPMGVVRPLTEVEMDHYREPFLNPVDREPLWRFPNELPIAGEPANIVALVEEYMDWLHQSPVPKLLFWGTPGVLIPPAEAARLAKSLPNCKAVDIGPGLNLLQEDNPDLIGSEIARWLSTLEISG

SEQ ID NO: 1256 - protein, 277 aa, Synthetic construct
MFHYVDVGPRDGAPVLFLHGNPTSSYVWRNIIPHVAPTHRCIAPDLIGMGKSDKPDLGYFFDDHVRFMDAFIEALGLEEVVLVIHDWGSALGFHWAKRNPERVKGIAFMEFIRPIPTWDEWPEFARETFQAFRTTDVGRKLIIDQNVFIEGTLPMGVVRPLTEVEMDHYREPFLNPVDREPLWRFPNELPIAGEPANIVALVEEYMDWLHQSPVPKLLFWGTPGVLIPPAEAARLAKSLPNCKAVDIGPGLNLLQEDNPDLIGSEIARWLSTLEISG

SEQ ID NO: 1257 - protein, 277 aa, Synthetic construct
MFHYVDVGPRDGRPVLFLHGNPTSSYVWRNIIPHVAPTHRCIAPDLIGMGKSDKPDLGYFFDDHVRFMDAFIEALGLEEVVLVIHDWGSALGFHWAKRNPERVKGIAFMEFIRPIPTWDEWPEFARETFQAFRTTDVGRKLIIDQNVFIEGTLPMGVVRPLTEVEMDHYREPFLNPVDREPLWRFPNELPIAGEPANIVALVEEYMDWLHQSPVPKLLFWGTPGVLIPPAEAARLAKSLPNCKAVDIGPGLNLLQEDNPDLIGSEIARWLSTLEISG

SEQ ID NO: 1258 - protein, 277 aa, Synthetic construct
MFHYVDVGPRDGQPVLFLHGNPTSSYVWRNIIPHVAPTHRCIAPDLIGMGKSDKPDLGYFFDDHVRFMDAFIEALGLEEVVLVIHDWGSALGFHWAKRNPERVKGIAFMEFIRPIPTWDEWPEFARETFQAFRTTDVGRKLIIDQNVFIEGTLPMGVVRPLTEVEMDHYREPFLNPVDREPLWRFPNELPIAGEPANIVALVEEYMDWLHQSPVPKLLFWGTPGVLIPPAEAARLAKSLPNCKAVDIGPGLNLLQEDNPDLIGSEIARWLSTLEISG

SEQ ID NO: 1259 - protein, 277 aa, Synthetic construct
MFHYVDVGPRDGPPVLFLHGNPTSSYVWRNIIPHVAPTHRCIAPDLIGMGKSDKPDLGYFFDDHVRFMDAFIEALGLEEVVLVIHDWGSALGFHWAKRNPERVKGIAFMEFIRPIPTWDEWPEFARETFQAFRTTDVGRKLIIDQNVFIEGTLPMGVVRPLTEVEMDHYREPFLNPVDREPLWRFPNELPIAGEPANIVALVEEYMDWLHQSPVPKLLFWGTPGVLIPPAEAARLAKSLPNCKAVDIGPGLNLLQEDNPDLIGSEIARWLSTLEISG

SEQ ID NO: 1260 - protein, 277 aa, Synthetic construct
MFHYVDVGPRDGTAVLFLHGNPTSSYVWRNIIPHVAPTHRCIAPDLIGMGKSDKPDLGYFFDDHVRFMDAFIEALGLEEVVLVIHDWGSALGFHWAKRNPERVKGIAFMEFIRPIPTWDEWPEFARETFQAFRTTDVGRKLIIDQNVFIEGTLPMGVVRPLTEVEMDHYREPFLNPVDREPLWRFPNELPIAGEPANIVALVEEYMDWLHQSPVPKLLFWGTPGVLIPPAEAARLAKSLPNCKAVDIGPGLNLLQEDNPDLIGSEIARWLSTLEISG

SEQ ID NO: 1261 - protein, 277 aa, Synthetic construct
MFHYVDVGPRDGTTVLFLHGNPTSSYVWRNIIPHVAPTHRCIAPDLIGMGKSDKPDLGYFFDDHVRFMDAFIEALGLEEVVLVIHDWGSALGFHWAKRNPERVKGIAFMEFIRPIPTWDEWPEFARETFQAFRTTDVGRKLIIDQNVFIEGTLPMGVVRPLTEVEMDHYREPFLNPVDREPLWRFPNELPIAGEPANIVALVEEYMDWLHQSPVPKLLFWGTPGVLIPPAEAARLAKSLPNCKAVDIGPGLNLLQEDNPDLIGSEIARWLSTLEISG

SEQ ID NO: 1262 - protein, 277 aa, Synthetic construct
MFHYVDVGPRDGTVVLFLHGNPTSSYVWRNIIPHVAPTHRCIAPDLIGMGKSDKPDLGYFFDDHVRFMDAFIEALGLEEVVLVIHDWGSALGFHWAKRNPERVKGIAFMEFIRPIPTWDEWPEFARETFQAFRTTDVGRKLIIDQNVFIEGTLPMGVVRPLTEVEMDHYREPFLNPVDREPLWRFPNELPIAGEPANIVALVEEYMDWLHQSPVPKLLFWGTPGVLIPPAEAARLAKSLPNCKAVDIGPGLNLLQEDNPDLIGSEIARWLSTLEISG

SEQ ID NO: 1263 - protein, 277 aa, Synthetic construct
MFHYVDVGPRDGTSVLFLHGNPTSSYVWRNIIPHVAPTHRCIAPDLIGMGKSDKPDLGYFFDDHVRFMDAFIEALGLEEVVLVIHDWGSALGFHWAKRNPERVKGIAFMEFIRPIPTWDEWPEFARETFQAFRTTDVGRKLIIDQNVFIEGTLPMGVVRPLTEVEMDHYREPFLNPVDREPLWRFPNELPIAGEPANIVALVEEYMDWLHQSPVPKLLFWGTPGVLIPPAEAARLAKSLPNCKAVDIGPGLNLLQEDNPDLIGSEIARWLSTLEISG

SEQ ID NO: 1264 - protein, 277 aa, Synthetic construct
MFHYVDVGPRDGTIVLFLHGNPTSSYVWRNIIPHVAPTHRCIAPDLIGMGKSDKPDLGYFFDDHVRFMDAFIEALGLEEVVLVIHDWGSALGFHWAKRNPERVKGIAFMEFIRPIPTWDEWPEFARETFQAFRTTDVGRKLIIDQNVFIEGTLPMGVVRPLTEVEMDHYREPFLNPVDREPLWRFPNELPIAGEPANIVALVEEYMDWLHQSPVPKLLFWGTPGVLIPPAEAARLAKSLPNCKAVDIGPGLNLLQEDNPDLIGSEIARWLSTLEISG

SEQ ID NO: 1265 - protein, 277 aa, Synthetic construct
MFHYVDVGPRDGTLVLFLHGNPTSSYVWRNIIPHVAPTHRCIAPDLIGMGKSDKPDLGYFFDDHVRFMDAFIEALGLEEVVLVIHDWGSALGFHWAKRNPERVKGIAFMEFIRPIPTWDEWPEFARETFQAFRTTDVGRKLIIDQNVFIEGTLPMGVVRPLTEVEMDHYREPFLNPVDREPLWRFPNELPIAGEPANIVALVEEYMDWLHQSPVPKLLFWGTPGVLIPPAEAARLAKSLPNCKAVDIGPGLNLLQEDNPDLIGSEIARWLSTLEISG

SEQ ID NO: 1266 - protein, 277 aa, Synthetic construct
MFHYVDVGPRDGTPILFLHGNPTSSYVWRNIIPHVAPTHRCIAPDLIGMGKSDKPDLGYFFDDHVRFMDAFIEALGLEEVVLVIHDWGSALGFHWAKRNPERVKGIAFMEFIRPIPTWDEWPEFARETFQAFRTTDVGRKLIIDQNVFIEGTLPMGVVRPLTEVEMDHYREPFLNPVDREPLWRFPNELPIAGEPANIVALVEEYMDWLHQSPVPKLLFWGTPGVLIPPAEAARLAKSLPNCKAVDIGPGLNLLQEDNPDLIGSEIARWLSTLEISG

SEQ ID NO: 1267 - protein, 277 aa, Synthetic construct
MFHYVDVGPRDGTPLLFLHGNPTSSYVWRNIIPHVAPTHRCIAPDLIGMGKSDKPDLGYFFDDHVRFMDAFIEALGLEEVVLVIHDWGSALGFHWAKRNPERVKGIAFMEFIRPIPTWDEWPEFARETFQAFRTTDVGRKLIIDQNVFIEGTLPMGVVRPLTEVEMDHYREPFLNPVDREPLWRFPNELPIAGEPANIVALVEEYMDWLHQSPVPKLLFWGTPGVLIPPAEAARLAKSLPNCKAVDIGPGLNLLQEDNPDLIGSEIARWLSTLEISG

SEQ ID NO: 1268 - protein, 277 aa, Synthetic construct
MFHYVDVGPRDGTPALFLHGNPTSSYVWRNIIPHVAPTHRCIAPDLIGMGKSDKPDLGYFFDDHVRFMDAFIEALGLEEVVLVIHDWGSALGFHWAKRNPERVKGIAFMEFIRPIPTWDEWPEFARETFQAFRTTDVGRKLIIDQNVFIEGTLPMGVVRPLTEVEMDHYREPFLNPVDREPLWRFPNELPIAGEPANIVALVEEYMDWLHQSPVPKLLFWGTPGVLIPPAEAARLAKSLPNCKAVDIGPGLNLLQEDNPDLIGSEIARWLSTLEISG

SEQ ID NO: 1269 - protein, 277 aa, Synthetic construct
MFHYVDVGPRDGTPMLFLHGNPTSSYVWRNIIPHVAPTHRCIAPDLIGMGKSDKPDLGYFFDDHVRFMDAFIEALGLEEVVLVIHDWGSALGFHWAKRNPERVKGIAFMEFIRPIPTWDEWPEFARETFQAFRTTDVGRKLIIDQNVFIEGTLPMGVVRPLTEVEMDHYREPFLNPVDREPLWRFPNELPIAGEPANIVALVEEYMDWLHQSPVPKLLFWGTPGVLIPPAEAARLAKSLPNCKAVDIGPGLNLLQEDNPDLIGSEIARWLSTLEISG

SEQ ID NO: 1270 - protein, 277 aa, Synthetic construct
MFHYVDVGPRDGTPTLFLHGNPTSSYVWRNIIPHVAPTHRCIAPDLIGMGKSDKPDLGYFFDDHVRFMDAFIEALGLEEVVLVIHDWGSALGFHWAKRNPERVKGIAFMEFIRPIPTWDEWPEFARETFQAFRTTDVGRKLIIDQNVFIEGTLPMGVVRPLTEVEMDHYREPFLNPVDREPLWRFPNELPIAGEPANIVALVEEYMDWLHQSPVPKLLFWGTPGVLIPPAEAARLAKSLPNCKAVDIGPGLNLLQEDNPDLIGSEIARWLSTLEISG

SEQ ID NO: 1271 - protein, 277 aa, Synthetic construct
MFHYVDVGPRDGTPFLFLHGNPTSSYVWRNIIPHVAPTHRCIAPDLIGMGKSDKPDLGYFFDDHVRFMDAFIEALGLEEVVLVIHDWGSALGFHWAKRNPERVKGIAFMEFIRPIPTWDEWPEFARETFQAFRTTDVGRKLIIDQNVFIEGTLPMGVVRPLTEVEMDHYREPFLNPVDREPLWRFPNELPIAGEPANIVALVEEYMDWLHQSPVPKLLFWGTPGVLIPPAEAARLAKSLPNCKAVDIGPGLNLLQEDNPDLIGSEIARWLSTLEISG

SEQ ID NO: 1272 - protein, 277 aa, Synthetic construct
MFHYVDVGPRDGTPVVFLHGNPTSSYVWRNIIPHVAPTHRCIAPDLIGMGKSDKPDLGYFFDDHVRFMDAFIEALGLEEVVLVIHDWGSALGFHWAKRNPERVKGIAFMEFIRPIPTWDEWPEFARETFQAFRTTDVGRKLIIDQNVFIEGTLPMGVVRPLTEVEMDHYREPFLNPVDREPLWRFPNELPIAGEPANIVALVEEYMDWLHQSPVPKLLFWGTPGVLIPPAEAARLAKSLPNCKAVDIGPGLNLLQEDNPDLIGSEIARWLSTLEISG

SEQ ID NO: 1273 - protein, 277 aa, Synthetic construct
MFHYVDVGPRDGTPVIFLHGNPTSSYVWRNIIPHVAPTHRCIAPDLIGMGKSDKPDLGYFFDDHVRFMDAFIEALGLEEVVLVIHDWGSALGFHWAKRNPERVKGIAFMEFIRPIPTWDEWPEFARETFQAFRTTDVGRKLIIDQNVFIEGTLPMGVVRPLTEVEMDHYREPFLNPVDREPLWRFPNELPIAGEPANIVALVEEYMDWLHQSPVPKLLFWGTPGVLIPPAEAARLAKSLPNCKAVDIGPGLNLLQEDNPDLIGSEIARWLSTLEISG

SEQ ID NO: 1274 - protein, 277 aa, Synthetic construct
MFHYVDVGPRDGTPVMFLHGNPTSSYVWRNIIPHVAPTHRCIAPDLIGMGKSDKPDLGYFFDDHVRFMDAFIEALGLEEVVLVIHDWGSALGFHWAKRNPERVKGIAFMEFIRPIPTWDEWPEFARETFQAFRTTDVGRKLIIDQNVFIEGTLPMGVVRPLTEVEMDHYREPFLNPVDREPLWRFPNELPIAGEPANIVALVEEYMDWLHQSPVPKLLFWGTPGVLIPPAEAARLAKSLPNCKAVDIGPGLNLLQEDNPDLIGSEIARWLSTLEISG

SEQ ID NO: 1275 - protein, 277 aa, Synthetic construct
MFHYVDVGPRDGTPVFFLHGNPTSSYVWRNIIPHVAPTHRCIAPDLIGMGKSDKPDLGYFFDDHVRFMDAFIEALGLEEVVLVIHDWGSALGFHWAKRNPERVKGIAFMEFIRPIPTWDEWPEFARETFQAFRTTDVGRKLIIDQNVFIEGTLPMGVVRPLTEVEMDHYREPFLNPVDREPLWRFPNELPIAGEPANIVALVEEYMDWLHQSPVPKLLFWGTPGVLIPPAEAARLAKSLPNCKAVDIGPGLNLLQEDNPDLIGSEIARWLSTLEISG

SEQ ID NO: 1276 - protein, 277 aa, Synthetic construct
MFHYVDVGPRDGTPVAFLHGNPTSSYVWRNIIPHVAPTHRCIAPDLIGMGKSDKPDLGYFFDDHVRFMDAFIEALGLEEVVLVIHDWGSALGFHWAKRNPERVKGIAFMEFIRPIPTWDEWPEFARETFQAFRTTDVGRKLIIDQNVFIEGTLPMGVVRPLTEVEMDHYREPFLNPVDREPLWRFPNELPIAGEPANIVALVEEYMDWLHQSPVPKLLFWGTPGVLIPPAEAARLAKSLPNCKAVDIGPGLNLLQEDNPDLIGSEIARWLSTLEISG

SEQ ID NO: 1277 - protein, 277 aa, Synthetic construct
MFHYVDVGPRDGTPVCFLHGNPTSSYVWRNIIPHVAPTHRCIAPDLIGMGKSDKPDLGYFFDDHVRFMDAFIEALGLEEVVLVIHDWGSALGFHWAKRNPERVKGIAFMEFIRPIPTWDEWPEFARETFQAFRTTDVGRKLIIDQNVFIEGTLPMGVVRPLTEVEMDHYREPFLNPVDREPLWRFPNELPIAGEPANIVALVEEYMDWLHQSPVPKLLFWGTPGVLIPPAEAARLAKSLPNCKAVDIGPGLNLLQEDNPDLIGSEIARWLSTLEISG

SEQ ID NO: 1278 - protein, 277 aa, Synthetic construct
MFHYVDVGPRDGTPVLLLHGNPTSSYVWRNIIPHVAPTHRCIAPDLIGMGKSDKPDLGYFFDDHVRFMDAFIEALGLEEVVLVIHDWGSALGFHWAKRNPERVKGIAFMEFIRPIPTWDEWPEFARETFQAFRTTDVGRKLIIDQNVFIEGTLPMGVVRPLTEVEMDHYREPFLNPVDREPLWRFPNELPIAGEPANIVALVEEYMDWLHQSPVPKLLFWGTPGVLIPPAEAARLAKSLPNCKAVDIGPGLNLLQEDNPDLIGSEIARWLSTLEISG

SEQ ID NO: 1279 - protein, 277 aa, Synthetic construct
MFHYVDVGPRDGTPVLMLHGNPTSSYVWRNIIPHVAPTHRCIAPDLIGMGKSDKPDLGYFFDDHVRFMDAFIEALGLEEVVLVIHDWGSALGFHWAKRNPERVKGIAFMEFIRPIPTWDEWPEFARETFQAFRTTDVGRKLIIDQNVFIEGTLPMGVVRPLTEVEMDHYREPFLNPVDREPLWRFPNELPIAGEPANIVALVEEYMDWLHQSPVPKLLFWGTPGVLIPPAEAARLAKSLPNCKAVDIGPGLNLLQEDNPDLIGSEIARWLSTLEISG

SEQ ID NO: 1280 - protein, 277 aa, Synthetic construct
MFHYVDVGPRDGTPVLYLHGNPTSSYVWRNIIPHVAPTHRCIAPDLIGMGKSDKPDLGYFFDDHVRFMDAFIEALGLEEVVLVIHDWGSALGFHWAKRNPERVKGIAFMEFIRPIPTWDEWPEFARETFQAFRTTDVGRKLIIDQNVFIEGTLPMGVVRPLTEVEMDHYREPFLNPVDREPLWRFPNELPIAGEPANIVALVEEYMDWLHQSPVPKLLFWGTPGVLIPPAEAARLAKSLPNCKAVDIGPGLNLLQEDNPDLIGSEIARWLSTLEISG

SEQ ID NO: 1281 - protein, 277 aa, Synthetic construct
MFHYVDVGPRDGTPVLCLHGNPTSSYVWRNIIPHVAPTHRCIAPDLIGMGKSDKPDLGYFFDDHVRFMDAFIEALGLEEVVLVIHDWGSALGFHWAKRNPERVKGIAFMEFIRPIPTWDEWPEFARETFQAFRTTDVGRKLIIDQNVFIEGTLPMGVVRPLTEVEMDHYREPFLNPVDREPLWRFPNELPIAGEPANIVALVEEYMDWLHQSPVPKLLFWGTPGVLIPPAEAARLAKSLPNCKAVDIGPGLNLLQEDNPDLIGSEIARWLSTLEISG

SEQ ID NO: 1282 - protein, 277 aa, Synthetic construct
MFHYVDVGPRDGTPVLWLHGNPTSSYVWRNIIPHVAPTHRCIAPDLIGMGKSDKPDLGYFFDDHVRFMDAFIEALGLEEVVLVIHDWGSALGFHWAKRNPERVKGIAFMEFIRPIPTWDEWPEFARETFQAFRTTDVGRKLIIDQNVFIEGTLPMGVVRPLTEVEMDHYREPFLNPVDREPLWRFPNELPIAGEPANIVALVEEYMDWLHQSPVPKLLFWGTPGVLIPPAEAARLAKSLPNCKAVDIGPGLNLLQEDNPDLIGSEIARWLSTLEISG

SEQ ID NO: 1283 - protein, 277 aa, Synthetic construct
MFHYVDVGPRDGTPVLILHGNPTSSYVWRNIIPHVAPTHRCIAPDLIGMGKSDKPDLGYFFDDHVRFMDAFIEALGLEEVVLVIHDWGSALGFHWAKRNPERVKGIAFMEFIRPIPTWDEWPEFARETFQAFRTTDVGRKLIIDQNVFIEGTLPMGVVRPLTEVEMDHYREPFLNPVDREPLWRFPNELPIAGEPANIVALVEEYMDWLHQSPVPKLLFWGTPGVLIPPAEAARLAKSLPNCKAVDIGPGLNLLQEDNPDLIGSEIARWLSTLEISG

SEQ ID NO: 1284 - protein, 277 aa, Synthetic construct
MFHYVDVGPRDGTPVLFVHGNPTSSYVWRNIIPHVAPTHRCIAPDLIGMGKSDKPDLGYFFDDHVRFMDAFIEALGLEEVVLVIHDWGSALGFHWAKRNPERVKGIAFMEFIRPIPTWDEWPEFARETFQAFRTTDVGRKLIIDQNVFIEGTLPMGVVRPLTEVEMDHYREPFLNPVDREPLWRFPNELPIAGEPANIVALVEEYMDWLHQSPVPKLLFWGTPGVLIPPAEAARLAKSLPNCKAVDIGPGLNLLQEDNPDLIGSEIARWLSTLEISG

SEQ ID NO: 1285 - protein, 277 aa, Synthetic construct
MFHYVDVGPRDGTPVLFMHGNPTSSYVWRNIIPHVAPTHRCIAPDLIGMGKSDKPDLGYFFDDHVRFMDAFIEALGLEEVVLVIHDWGSALGFHWAKRNPERVKGIAFMEFIRPIPTWDEWPEFARETFQAFRTTDVGRKLIIDQNVFIEGTLPMGVVRPLTEVEMDHYREPFLNPVDREPLWRFPNELPIAGEPANIVALVEEYMDWLHQSPVPKLLFWGTPGVLIPPAEAARLAKSLPNCKAVDIGPGLNLLQEDNPDLIGSEIARWLSTLEISG

SEQ ID NO: 1286 - protein, 277 aa, Synthetic construct
MFHYVDVGPRDGTPVLFIHGNPTSSYVWRNIIPHVAPTHRCIAPDLIGMGKSDKPDLGYFFDDHVRFMDAFIEALGLEEVVLVIHDWGSALGFHWAKRNPERVKGIAFMEFIRPIPTWDEWPEFARETFQAFRTTDVGRKLIIDQNVFIEGTLPMGVVRPLTEVEMDHYREPFLNPVDREPLWRFPNELPIAGEPANIVALVEEYMDWLHQSPVPKLLFWGTPGVLIPPAEAARLAKSLPNCKAVDIGPGLNLLQEDNPDLIGSEIARWLSTLEISG

SEQ ID NO: 1287 - protein, 277 aa, Synthetic construct
MFHYVDVGPRDGTPVLFFHGNPTSSYVWRNIIPHVAPTHRCIAPDLIGMGKSDKPDLGYFFDDHVRFMDAFIEALGLEEVVLVIHDWGSALGFHWAKRNPERVKGIAFMEFIRPIPTWDEWPEFARETFQAFRTTDVGRKLIIDQNVFIEGTLPMGVVRPLTEVEMDHYREPFLNPVDREPLWRFPNELPIAGEPANIVALVEEYMDWLHQSPVPKLLFWGTPGVLIPPAEAARLAKSLPNCKAVDIGPGLNLLQEDNPDLIGSEIARWLSTLEISG

SEQ ID NO: 1288 - protein, 277 aa, Synthetic construct
MFHYVDVGPRDGTPVLFQHGNPTSSYVWRNIIPHVAPTHRCIAPDLIGMGKSDKPDLGYFFDDHVRFMDAFIEALGLEEVVLVIHDWGSALGFHWAKRNPERVKGIAFMEFIRPIPTWDEWPEFARETFQAFRTTDVGRKLIIDQNVFIEGTLPMGVVRPLTEVEMDHYREPFLNPVDREPLWRFPNELPIAGEPANIVALVEEYMDWLHQSPVPKLLFWGTPGVLIPPAEAARLAKSLPNCKAVDIGPGLNLLQEDNPDLIGSEIARWLSTLEISG

SEQ ID NO: 1289 - protein, 277 aa, Synthetic construct
MFHYVDVGPRDGTPVLFCHGNPTSSYVWRNIIPHVAPTHRCIAPDLIGMGKSDKPDLGYFFDDHVRFMDAFIEALGLEEVVLVIHDWGSALGFHWAKRNPERVKGIAFMEFIRPIPTWDEWPEFARETFQAFRTTDVGRKLIIDQNVFIEGTLPMGVVRPLTEVEMDHYREPFLNPVDREPLWRFPNELPIAGEPANIVALVEEYMDWLHQSPVPKLLFWGTPGVLIPPAEAARLAKSLPNCKAVDIGPGLNLLQEDNPDLIGSEIARWLSTLEISG

SEQ ID NO: 1290 - protein, 277 aa, Synthetic construct
MFHYVDVGPRDGTPVLFLNGNPTSSYVWRNIIPHVAPTHRCIAPDLIGMGKSDKPDLGYFFDDHVRFMDAFIEALGLEEVVLVIHDWGSALGFHWAKRNPERVKGIAFMEFIRPIPTWDEWPEFARETFQAFRTTDVGRKLIIDQNVFIEGTLPMGVVRPLTEVEMDHYREPFLNPVDREPLWRFPNELPIAGEPANIVALVEEYMDWLHQSPVPKLLFWGTPGVLIPPAEAARLAKSLPNCKAVDIGPGLNLLQEDNPDLIGSEIARWLSTLEISG

SEQ ID NO: 1291 - protein, 277 aa, Synthetic construct
MFHYVDVGPRDGTPVLFLQGNPTSSYVWRNIIPHVAPTHRCIAPDLIGMGKSDKPDLGYFFDDHVRFMDAFIEALGLEEVVLVIHDWGSALGFHWAKRNPERVKGIAFMEFIRPIPTWDEWPEFARETFQAFRTTDVGRKLIIDQNVFIEGTLPMGVVRPLTEVEMDHYREPFLNPVDREPLWRFPNELPIAGEPANIVALVEEYMDWLHQSPVPKLLFWGTPGVLIPPAEAARLAKSLPNCKAVDIGPGLNLLQEDNPDLIGSEIARWLSTLEISG

SEQ ID NO: 1292 - protein, 277 aa, Synthetic construct
MFHYVDVGPRDGTPVLFLSGNPTSSYVWRNIIPHVAPTHRCIAPDLIGMGKSDKPDLGYFFDDHVRFMDAFIEALGLEEVVLVIHDWGSALGFHWAKRNPERVKGIAFMEFIRPIPTWDEWPEFARETFQAFRTTDVGRKLIIDQNVFIEGTLPMGVVRPLTEVEMDHYREPFLNPVDREPLWRFPNELPIAGEPANIVALVEEYMDWLHQSPVPKLLFWGTPGVLIPPAEAARLAKSLPNCKAVDIGPGLNLLQEDNPDLIGSEIARWLSTLEISG

SEQ ID NO: 1293 - protein, 277 aa, Synthetic construct
MFHYVDVGPRDGTPVLFLPGNPTSSYVWRNIIPHVAPTHRCIAPDLIGMGKSDKPDLGYFFDDHVRFMDAFIEALGLEEVVLVIHDWGSALGFHWAKRNPERVKGIAFMEFIRPIPTWDEWPEFARETFQAFRTTDVGRKLIIDQNVFIEGTLPMGVVRPLTEVEMDHYREPFLNPVDREPLWRFPNELPIAGEPANIVALVEEYMDWLHQSPVPKLLFWGTPGVLIPPAEAARLAKSLPNCKAVDIGPGLNLLQEDNPDLIGSEIARWLSTLEISG

SEQ ID NO: 1294 - protein, 277 aa, Synthetic construct
MFHYVDVGPRDGTPVLFLYGNPTSSYVWRNIIPHVAPTHRCIAPDLIGMGKSDKPDLGYFFDDHVRFMDAFIEALGLEEVVLVIHDWGSALGFHWAKRNPERVKGIAFMEFIRPIPTWDEWPEFARETFQAFRTTDVGRKLIIDQNVFIEGTLPMGVVRPLTEVEMDHYREPFLNPVDREPLWRFPNELPIAGEPANIVALVEEYMDWLHQSPVPKLLFWGTPGVLIPPAEAARLAKSLPNCKAVDIGPGLNLLQEDNPDLIGSEIARWLSTLEISG

SEQ ID NO: 1295 - protein, 277 aa, Synthetic construct
MFHYVDVGPRDGTPVLFLAGNPTSSYVWRNIIPHVAPTHRCIAPDLIGMGKSDKPDLGYFFDDHVRFMDAFIEALGLEEVVLVIHDWGSALGFHWAKRNPERVKGIAFMEFIRPIPTWDEWPEFARETFQAFRTTDVGRKLIIDQNVFIEGTLPMGVVRPLTEVEMDHYREPFLNPVDREPLWRFPNELPIAGEPANIVALVEEYMDWLHQSPVPKLLFWGTPGVLIPPAEAARLAKSLPNCKAVDIGPGLNLLQEDNPDLIGSEIARWLSTLEISG

SEQ ID NO: 1296 - protein, 277 aa, Synthetic construct
MFHYVDVGPRDGTPVLFLHANPTSSYVWRNIIPHVAPTHRCIAPDLIGMGKSDKPDLGYFFDDHVRFMDAFIEALGLEEVVLVIHDWGSALGFHWAKRNPERVKGIAFMEFIRPIPTWDEWPEFARETFQAFRTTDVGRKLIIDQNVFIEGTLPMGVVRPLTEVEMDHYREPFLNPVDREPLWRFPNELPIAGEPANIVALVEEYMDWLHQSPVPKLLFWGTPGVLIPPAEAARLAKSLPNCKAVDIGPGLNLLQEDNPDLIGSEIARWLSTLEISG

SEQ ID NO: 1297 - protein, 277 aa, Synthetic construct
MFHYVDVGPRDGTPVLFLHSNPTSSYVWRNIIPHVAPTHRCIAPDLIGMGKSDKPDLGYFFDDHVRFMDAFIEALGLEEVVLVIHDWGSALGFHWAKRNPERVKGIAFMEFIRPIPTWDEWPEFARETFQAFRTTDVGRKLIIDQNVFIEGTLPMGVVRPLTEVEMDHYREPFLNPVDREPLWRFPNELPIAGEPANIVALVEEYMDWLHQSPVPKLLFWGTPGVLIPPAEAARLAKSLPNCKAVDIGPGLNLLQEDNPDLIGSEIARWLSTLEISG

SEQ ID NO: 1298 - protein, 277 aa, Synthetic construct
MFHYVDVGPRDGTPVLFLHCNPTSSYVWRNIIPHVAPTHRCIAPDLIGMGKSDKPDLGYFFDDHVRFMDAFIEALGLEEVVLVIHDWGSALGFHWAKRNPERVKGIAFMEFIRPIPTWDEWPEFARETFQAFRTTDVGRKLIIDQNVFIEGTLPMGVVRPLTEVEMDHYREPFLNPVDREPLWRFPNELPIAGEPANIVALVEEYMDWLHQSPVPKLLFWGTPGVLIPPAEAARLAKSLPNCKAVDIGPGLNLLQEDNPDLIGSEIARWLSTLEISG

SEQ ID NO: 1299 - protein, 277 aa, Synthetic construct
MFHYVDVGPRDGTPVLFLHDNPTSSYVWRNIIPHVAPTHRCIAPDLIGMGKSDKPDLGYFFDDHVRFMDAFIEALGLEEVVLVIHDWGSALGFHWAKRNPERVKGIAFMEFIRPIPTWDEWPEFARETFQAFRTTDVGRKLIIDQNVFIEGTLPMGVVRPLTEVEMDHYREPFLNPVDREPLWRFPNELPIAGEPANIVALVEEYMDWLHQSPVPKLLFWGTPGVLIPPAEAARLAKSLPNCKAVDIGPGLNLLQEDNPDLIGSEIARWLSTLEISG

SEQ ID NO: 1300 - protein, 277 aa, Synthetic construct
MFHYVDVGPRDGTPVLFLHPNPTSSYVWRNIIPHVAPTHRCIAPDLIGMGKSDKPDLGYFFDDHVRFMDAFIEALGLEEVVLVIHDWGSALGFHWAKRNPERVKGIAFMEFIRPIPTWDEWPEFARETFQAFRTTDVGRKLIIDQNVFIEGTLPMGVVRPLTEVEMDHYREPFLNPVDREPLWRFPNELPIAGEPANIVALVEEYMDWLHQSPVPKLLFWGTPGVLIPPAEAARLAKSLPNCKAVDIGPGLNLLQEDNPDLIGSEIARWLSTLEISG

SEQ ID NO: 1301 - protein, 277 aa, Synthetic construct
MFHYVDVGPRDGTPVLFLHVNPTSSYVWRNIIPHVAPTHRCIAPDLIGMGKSDKPDLGYFFDDHVRFMDAFIEALGLEEVVLVIHDWGSALGFHWAKRNPERVKGIAFMEFIRPIPTWDEWPEFARETFQAFRTTDVGRKLIIDQNVFIEGTLPMGVVRPLTEVEMDHYREPFLNPVDREPLWRFPNELPIAGEPANIVALVEEYMDWLHQSPVPKLLFWGTPGVLIPPAEAARLAKSLPNCKAVDIGPGLNLLQEDNPDLIGSEIARWLSTLEISG

SEQ ID NO: 1302 - protein, 277 aa, Synthetic construct
MFHYVDVGPRDGTPVLFLHGTPTSSYVWRNIIPHVAPTHRCIAPDLIGMGKSDKPDLGYFFDDHVRFMDAFIEALGLEEVVLVIHDWGSALGFHWAKRNPERVKGIAFMEFIRPIPTWDEWPEFARETFQAFRTTDVGRKLIIDQNVFIEGTLPMGVVRPLTEVEMDHYREPFLNPVDREPLWRFPNELPIAGEPANIVALVEEYMDWLHQSPVPKLLFWGTPGVLIPPAEAARLAKSLPNCKAVDIGPGLNLLQEDNPDLIGSEIARWLSTLEISG

SEQ ID NO: 1303 - protein, 277 aa, Synthetic construct
MFHYVDVGPRDGTPVLFLHGSPTSSYVWRNIIPHVAPTHRCIAPDLIGMGKSDKPDLGYFFDDHVRFMDAFIEALGLEEVVLVIHDWGSALGFHWAKRNPERVKGIAFMEFIRPIPTWDEWPEFARETFQAFRTTDVGRKLIIDQNVFIEGTLPMGVVRPLTEVEMDHYREPFLNPVDREPLWRFPNELPIAGEPANIVALVEEYMDWLHQSPVPKLLFWGTPGVLIPPAEAARLAKSLPNCKAVDIGPGLNLLQEDNPDLIGSEIARWLSTLEISG

SEQ ID NO: 1304 - protein, 277 aa, Synthetic construct
MFHYVDVGPRDGTPVLFLHGVPTSSYVWRNIIPHVAPTHRCIAPDLIGMGKSDKPDLGYFFDDHVRFMDAFIEALGLEEVVLVIHDWGSALGFHWAKRNPERVKGIAFMEFIRPIPTWDEWPEFARETFQAFRTTDVGRKLIIDQNVFIEGTLPMGVVRPLTEVEMDHYREPFLNPVDREPLWRFPNELPIAGEPANIVALVEEYMDWLHQSPVPKLLFWGTPGVLIPPAEAARLAKSLPNCKAVDIGPGLNLLQEDNPDLIGSEIARWLSTLEISG

SEQ ID NO: 1305 - protein, 277 aa, Synthetic construct
MFHYVDVGPRDGTPVLFLHGQPTSSYVWRNIIPHVAPTHRCIAPDLIGMGKSDKPDLGYFFDDHVRFMDAFIEALGLEEVVLVIHDWGSALGFHWAKRNPERVKGIAFMEFIRPIPTWDEWPEFARETFQAFRTTDVGRKLIIDQNVFIEGTLPMGVVRPLTEVEMDHYREPFLNPVDREPLWRFPNELPIAGEPANIVALVEEYMDWLHQSPVPKLLFWGTPGVLIPPAEAARLAKSLPNCKAVDIGPGLNLLQEDNPDLIGSEIARWLSTLEISG

SEQ ID NO: 1306 - protein, 277 aa, Synthetic construct
MFHYVDVGPRDGTPVLFLHGAPTSSYVWRNIIPHVAPTHRCIAPDLIGMGKSDKPDLGYFFDDHVRFMDAFIEALGLEEVVLVIHDWGSALGFHWAKRNPERVKGIAFMEFIRPIPTWDEWPEFARETFQAFRTTDVGRKLIIDQNVFIEGTLPMGVVRPLTEVEMDHYREPFLNPVDREPLWRFPNELPIAGEPANIVALVEEYMDWLHQSPVPKLLFWGTPGVLIPPAEAARLAKSLPNCKAVDIGPGLNLLQEDNPDLIGSEIARWLSTLEISG

SEQ ID NO: 1307 - protein, 277 aa, Synthetic construct
MFHYVDVGPRDGTPVLFLHGIPTSSYVWRNIIPHVAPTHRCIAPDLIGMGKSDKPDLGYFFDDHVRFMDAFIEALGLEEVVLVIHDWGSALGFHWAKRNPERVKGIAFMEFIRPIPTWDEWPEFARETFQAFRTTDVGRKLIIDQNVFIEGTLPMGVVRPLTEVEMDHYREPFLNPVDREPLWRFPNELPIAGEPANIVALVEEYMDWLHQSPVPKLLFWGTPGVLIPPAEAARLAKSLPNCKAVDIGPGLNLLQEDNPDLIGSEIARWLSTLEISG

SEQ ID NO: 1308 - protein, 277 aa, Synthetic construct
MFHYVDVGPRDGTPVLFLHGNATSSYVWRNIIPHVAPTHRCIAPDLIGMGKSDKPDLGYFFDDHVRFMDAFIEALGLEEVVLVIHDWGSALGFHWAKRNPERVKGIAFMEFIRPIPTWDEWPEFARETFQAFRTTDVGRKLIIDQNVFIEGTLPMGVVRPLTEVEMDHYREPFLNPVDREPLWRFPNELPIAGEPANIVALVEEYMDWLHQSPVPKLLFWGTPGVLIPPAEAARLAKSLPNCKAVDIGPGLNLLQEDNPDLIGSEIARWLSTLEISG

SEQ ID NO: 1309 - protein, 277 aa, Synthetic construct
MFHYVDVGPRDGTPVLFLHGNSTSSYVWRNIIPHVAPTHRCIAPDLIGMGKSDKPDLGYFFDDHVRFMDAFIEALGLEEVVLVIHDWGSALGFHWAKRNPERVKGIAFMEFIRPIPTWDEWPEFARETFQAFRTTDVGRKLIIDQNVFIEGTLPMGVVRPLTEVEMDHYREPFLNPVDREPLWRFPNELPIAGEPANIVALVEEYMDWLHQSPVPKLLFWGTPGVLIPPAEAARLAKSLPNCKAVDIGPGLNLLQEDNPDLIGSEIARWLSTLEISG

SEQ ID NO: 1310 - protein, 277 aa, Synthetic construct
MFHYVDVGPRDGTPVLFLHGNLTSSYVWRNIIPHVAPTHRCIAPDLIGMGKSDKPDLGYFFDDHVRFMDAFIEALGLEEVVLVIHDWGSALGFHWAKRNPERVKGIAFMEFIRPIPTWDEWPEFARETFQAFRTTDVGRKLIIDQNVFIEGTLPMGVVRPLTEVEMDHYREPFLNPVDREPLWRFPNELPIAGEPANIVALVEEYMDWLHQSPVPKLLFWGTPGVLIPPAEAARLAKSLPNCKAVDIGPGLNLLQEDNPDLIGSEIARWLSTLEISG

SEQ ID NO: 1311 - protein, 277 aa, Synthetic construct
MFHYVDVGPRDGTPVLFLHGNTTSSYVWRNIIPHVAPTHRCIAPDLIGMGKSDKPDLGYFFDDHVRFMDAFIEALGLEEVVLVIHDWGSALGFHWAKRNPERVKGIAFMEFIRPIPTWDEWPEFARETFQAFRTTDVGRKLIIDQNVFIEGTLPMGVVRPLTEVEMDHYREPFLNPVDREPLWRFPNELPIAGEPANIVALVEEYMDWLHQSPVPKLLFWGTPGVLIPPAEAARLAKSLPNCKAVDIGPGLNLLQEDNPDLIGSEIARWLSTLEISG

SEQ ID NO: 1312 - protein, 277 aa, Synthetic construct
MFHYVDVGPRDGTPVLFLHGNVTSSYVWRNIIPHVAPTHRCIAPDLIGMGKSDKPDLGYFFDDHVRFMDAFIEALGLEEVVLVIHDWGSALGFHWAKRNPERVKGIAFMEFIRPIPTWDEWPEFARETFQAFRTTDVGRKLIIDQNVFIEGTLPMGVVRPLTEVEMDHYREPFLNPVDREPLWRFPNELPIAGEPANIVALVEEYMDWLHQSPVPKLLFWGTPGVLIPPAEAARLAKSLPNCKAVDIGPGLNLLQEDNPDLIGSEIARWLSTLEISG

SEQ ID NO: 1313 - protein, 277 aa, Synthetic construct
MFHYVDVGPRDGTPVLFLHGNGTSSYVWRNIIPHVAPTHRCIAPDLIGMGKSDKPDLGYFFDDHVRFMDAFIEALGLEEVVLVIHDWGSALGFHWAKRNPERVKGIAFMEFIRPIPTWDEWPEFARETFQAFRTTDVGRKLIIDQNVFIEGTLPMGVVRPLTEVEMDHYREPFLNPVDREPLWRFPNELPIAGEPANIVALVEEYMDWLHQSPVPKLLFWGTPGVLIPPAEAARLAKSLPNCKAVDIGPGLNLLQEDNPDLIGSEIARWLSTLEISG

SEQ ID NO: 1314 - protein, 277 aa, Synthetic construct
MFHYVDVGPRDGTPVLFLHGNPASSYVWRNIIPHVAPTHRCIAPDLIGMGKSDKPDLGYFFDDHVRFMDAFIEALGLEEVVLVIHDWGSALGFHWAKRNPERVKGIAFMEFIRPIPTWDEWPEFARETFQAFRTTDVGRKLIIDQNVFIEGTLPMGVVRPLTEVEMDHYREPFLNPVDREPLWRFPNELPIAGEPANIVALVEEYMDWLHQSPVPKLLFWGTPGVLIPPAEAARLAKSLPNCKAVDIGPGLNLLQEDNPDLIGSEIARWLSTLEISG

SEQ ID NO: 1315 - protein, 277 aa, Synthetic construct
MFHYVDVGPRDGTPVLFLHGNPSSSYVWRNIIPHVAPTHRCIAPDLIGMGKSDKPDLGYFFDDHVRFMDAFIEALGLEEVVLVIHDWGSALGFHWAKRNPERVKGIAFMEFIRPIPTWDEWPEFARETFQAFRTTDVGRKLIIDQNVFIEGTLPMGVVRPLTEVEMDHYREPFLNPVDREPLWRFPNELPIAGEPANIVALVEEYMDWLHQSPVPKLLFWGTPGVLIPPAEAARLAKSLPNCKAVDIGPGLNLLQEDNPDLIGSEIARWLSTLEISG

SEQ ID NO: 1316 - protein, 277 aa, Synthetic construct
MFHYVDVGPRDGTPVLFLHGNPVSSYVWRNIIPHVAPTHRCIAPDLIGMGKSDKPDLGYFFDDHVRFMDAFIEALGLEEVVLVIHDWGSALGFHWAKRNPERVKGIAFMEFIRPIPTWDEWPEFARETFQAFRTTDVGRKLIIDQNVFIEGTLPMGVVRPLTEVEMDHYREPFLNPVDREPLWRFPNELPIAGEPANIVALVEEYMDWLHQSPVPKLLFWGTPGVLIPPAEAARLAKSLPNCKAVDIGPGLNLLQEDNPDLIGSEIARWLSTLEISG

SEQ ID NO: 1317 - protein, 277 aa, Synthetic construct
MFHYVDVGPRDGTPVLFLHGNPGSSYVWRNIIPHVAPTHRCIAPDLIGMGKSDKPDLGYFFDDHVRFMDAFIEALGLEEVVLVIHDWGSALGFHWAKRNPERVKGIAFMEFIRPIPTWDEWPEFARETFQAFRTTDVGRKLIIDQNVFIEGTLPMGVVRPLTEVEMDHYREPFLNPVDREPLWRFPNELPIAGEPANIVALVEEYMDWLHQSPVPKLLFWGTPGVLIPPAEAARLAKSLPNCKAVDIGPGLNLLQEDNPDLIGSEIARWLSTLEISG

SEQ ID NO: 1318 - protein, 277 aa, Synthetic construct
MFHYVDVGPRDGTPVLFLHGNPNSSYVWRNIIPHVAPTHRCIAPDLIGMGKSDKPDLGYFFDDHVRFMDAFIEALGLEEVVLVIHDWGSALGFHWAKRNPERVKGIAFMEFIRPIPTWDEWPEFARETFQAFRTTDVGRKLIIDQNVFIEGTLPMGVVRPLTEVEMDHYREPFLNPVDREPLWRFPNELPIAGEPANIVALVEEYMDWLHQSPVPKLLFWGTPGVLIPPAEAARLAKSLPNCKAVDIGPGLNLLQEDNPDLIGSEIARWLSTLEISG

SEQ ID NO: 1319 - protein, 277 aa, Synthetic construct
MFHYVDVGPRDGTPVLFLHGNPMSSYVWRNIIPHVAPTHRCIAPDLIGMGKSDKPDLGYFFDDHVRFMDAFIEALGLEEVVLVIHDWGSALGFHWAKRNPERVKGIAFMEFIRPIPTWDEWPEFARETFQAFRTTDVGRKLIIDQNVFIEGTLPMGVVRPLTEVEMDHYREPFLNPVDREPLWRFPNELPIAGEPANIVALVEEYMDWLHQSPVPKLLFWGTPGVLIPPAEAARLAKSLPNCKAVDIGPGLNLLQEDNPDLIGSEIARWLSTLEISG

SEQ ID NO: 1320 - protein, 277 aa, Synthetic construct
MFHYVDVGPRDGTPVLFLHGNPTASYVWRNIIPHVAPTHRCIAPDLIGMGKSDKPDLGYFFDDHVRFMDAFIEALGLEEVVLVIHDWGSALGFHWAKRNPERVKGIAFMEFIRPIPTWDEWPEFARETFQAFRTTDVGRKLIIDQNVFIEGTLPMGVVRPLTEVEMDHYREPFLNPVDREPLWRFPNELPIAGEPANIVALVEEYMDWLHQSPVPKLLFWGTPGVLIPPAEAARLAKSLPNCKAVDIGPGLNLLQEDNPDLIGSEIARWLSTLEISG

SEQ ID NO: 1321 - protein, 277 aa, Synthetic construct
MFHYVDVGPRDGTPVLFLHGNPTTSYVWRNIIPHVAPTHRCIAPDLIGMGKSDKPDLGYFFDDHVRFMDAFIEALGLEEVVLVIHDWGSALGFHWAKRNPERVKGIAFMEFIRPIPTWDEWPEFARETFQAFRTTDVGRKLIIDQNVFIEGTLPMGVVRPLTEVEMDHYREPFLNPVDREPLWRFPNELPIAGEPANIVALVEEYMDWLHQSPVPKLLFWGTPGVLIPPAEAARLAKSLPNCKAVDIGPGLNLLQEDNPDLIGSEIARWLSTLEISG

SEQ ID NO: 1322 - protein, 277 aa, Synthetic construct
MFHYVDVGPRDGTPVLFLHGNPTWSYVWRNIIPHVAPTHRCIAPDLIGMGKSDKPDLGYFFDDHVRFMDAFIEALGLEEVVLVIHDWGSALGFHWAKRNPERVKGIAFMEFIRPIPTWDEWPEFARETFQAFRTTDVGRKLIIDQNVFIEGTLPMGVVRPLTEVEMDHYREPFLNPVDREPLWRFPNELPIAGEPANIVALVEEYMDWLHQSPVPKLLFWGTPGVLIPPAEAARLAKSLPNCKAVDIGPGLNLLQEDNPDLIGSEIARWLSTLEISG

SEQ ID NO: 1323 - protein, 277 aa, Synthetic construct
MFHYVDVGPRDGTPVLFLHGNPTCSYVWRNIIPHVAPTHRCIAPDLIGMGKSDKPDLGYFFDDHVRFMDAFIEALGLEEVVLVIHDWGSALGFHWAKRNPERVKGIAFMEFIRPIPTWDEWPEFARETFQAFRTTDVGRKLIIDQNVFIEGTLPMGVVRPLTEVEMDHYREPFLNPVDREPLWRFPNELPIAGEPANIVALVEEYMDWLHQSPVPKLLFWGTPGVLIPPAEAARLAKSLPNCKAVDIGPGLNLLQEDNPDLIGSEIARWLSTLEISG

SEQ ID NO: 1324 - protein, 277 aa, Synthetic construct
MFHYVDVGPRDGTPVLFLHGNPTGSYVWRNIIPHVAPTHRCIAPDLIGMGKSDKPDLGYFFDDHVRFMDAFIEALGLEEVVLVIHDWGSALGFHWAKRNPERVKGIAFMEFIRPIPTWDEWPEFARETFQAFRTTDVGRKLIIDQNVFIEGTLPMGVVRPLTEVEMDHYREPFLNPVDREPLWRFPNELPIAGEPANIVALVEEYMDWLHQSPVPKLLFWGTPGVLIPPAEAARLAKSLPNCKAVDIGPGLNLLQEDNPDLIGSEIARWLSTLEISG

SEQ ID NO: 1325 - protein, 277 aa, Synthetic construct
MFHYVDVGPRDGTPVLFLHGNPTNSYVWRNIIPHVAPTHRCIAPDLIGMGKSDKPDLGYFFDDHVRFMDAFIEALGLEEVVLVIHDWGSALGFHWAKRNPERVKGIAFMEFIRPIPTWDEWPEFARETFQAFRTTDVGRKLIIDQNVFIEGTLPMGVVRPLTEVEMDHYREPFLNPVDREPLWRFPNELPIAGEPANIVALVEEYMDWLHQSPVPKLLFWGTPGVLIPPAEAARLAKSLPNCKAVDIGPGLNLLQEDNPDLIGSEIARWLSTLEISG

SEQ ID NO: 1326 - protein, 277 aa, Synthetic construct
MFHYVDVGPRDGTPVLFLHGNPTSAYVWRNIIPHVAPTHRCIAPDLIGMGKSDKPDLGYFFDDHVRFMDAFIEALGLEEVVLVIHDWGSALGFHWAKRNPERVKGIAFMEFIRPIPTWDEWPEFARETFQAFRTTDVGRKLIIDQNVFIEGTLPMGVVRPLTEVEMDHYREPFLNPVDREPLWRFPNELPIAGEPANIVALVEEYMDWLHQSPVPKLLFWGTPGVLIPPAEAARLAKSLPNCKAVDIGPGLNLLQEDNPDLIGSEIARWLSTLEISG

SEQ ID NO: 1327 - protein, 277 aa, Synthetic construct
MFHYVDVGPRDGTPVLFLHGNPTSGYVWRNIIPHVAPTHRCIAPDLIGMGKSDKPDLGYFFDDHVRFMDAFIEALGLEEVVLVIHDWGSALGFHWAKRNPERVKGIAFMEFIRPIPTWDEWPEFARETFQAFRTTDVGRKLIIDQNVFIEGTLPMGVVRPLTEVEMDHYREPFLNPVDREPLWRFPNELPIAGEPANIVALVEEYMDWLHQSPVPKLLFWGTPGVLIPPAEAARLAKSLPNCKAVDIGPGLNLLQEDNPDLIGSEIARWLSTLEISG

SEQ ID NO: 1328 - protein, 277 aa, Synthetic construct
MFHYVDVGPRDGTPVLFLHGNPTSTYVWRNIIPHVAPTHRCIAPDLIGMGKSDKPDLGYFFDDHVRFMDAFIEALGLEEVVLVIHDWGSALGFHWAKRNPERVKGIAFMEFIRPIPTWDEWPEFARETFQAFRTTDVGRKLIIDQNVFIEGTLPMGVVRPLTEVEMDHYREPFLNPVDREPLWRFPNELPIAGEPANIVALVEEYMDWLHQSPVPKLLFWGTPGVLIPPAEAARLAKSLPNCKAVDIGPGLNLLQEDNPDLIGSEIARWLSTLEISG

SEQ ID NO: 1329 - protein, 277 aa, Synthetic construct
MFHYVDVGPRDGTPVLFLHGNPTSCYVWRNIIPHVAPTHRCIAPDLIGMGKSDKPDLGYFFDDHVRFMDAFIEALGLEEVVLVIHDWGSALGFHWAKRNPERVKGIAFMEFIRPIPTWDEWPEFARETFQAFRTTDVGRKLIIDQNVFIEGTLPMGVVRPLTEVEMDHYREPFLNPVDREPLWRFPNELPIAGEPANIVALVEEYMDWLHQSPVPKLLFWGTPGVLIPPAEAARLAKSLPNCKAVDIGPGLNLLQEDNPDLIGSEIARWLSTLEISG

SEQ ID NO: 1330 - protein, 277 aa, Synthetic construct
MFHYVDVGPRDGTPVLFLHGNPTSNYVWRNIIPHVAPTHRCIAPDLIGMGKSDKPDLGYFFDDHVRFMDAFIEALGLEEVVLVIHDWGSALGFHWAKRNPERVKGIAFMEFIRPIPTWDEWPEFARETFQAFRTTDVGRKLIIDQNVFIEGTLPMGVVRPLTEVEMDHYREPFLNPVDREPLWRFPNELPIAGEPANIVALVEEYMDWLHQSPVPKLLFWGTPGVLIPPAEAARLAKSLPNCKAVDIGPGLNLLQEDNPDLIGSEIARWLSTLEISG

SEQ ID NO: 1331 - protein, 277 aa, Synthetic construct
MFHYVDVGPRDGTPVLFLHGNPTSPYVWRNIIPHVAPTHRCIAPDLIGMGKSDKPDLGYFFDDHVRFMDAFIEALGLEEVVLVIHDWGSALGFHWAKRNPERVKGIAFMEFIRPIPTWDEWPEFARETFQAFRTTDVGRKLIIDQNVFIEGTLPMGVVRPLTEVEMDHYREPFLNPVDREPLWRFPNELPIAGEPANIVALVEEYMDWLHQSPVPKLLFWGTPGVLIPPAEAARLAKSLPNCKAVDIGPGLNLLQEDNPDLIGSEIARWLSTLEISG

SEQ ID NO: 1332 - protein, 277 aa, Synthetic construct
MFHYVDVGPRDGTPVLFLHGNPTSSFVWRNIIPHVAPTHRCIAPDLIGMGKSDKPDLGYFFDDHVRFMDAFIEALGLEEVVLVIHDWGSALGFHWAKRNPERVKGIAFMEFIRPIPTWDEWPEFARETFQAFRTTDVGRKLIIDQNVFIEGTLPMGVVRPLTEVEMDHYREPFLNPVDREPLWRFPNELPIAGEPANIVALVEEYMDWLHQSPVPKLLFWGTPGVLIPPAEAARLAKSLPNCKAVDIGPGLNLLQEDNPDLIGSEIARWLSTLEISG

SEQ ID NO: 1333 - protein, 277 aa, Synthetic construct
MFHYVDVGPRDGTPVLFLHGNPTSSHVWRNIIPHVAPTHRCIAPDLIGMGKSDKPDLGYFFDDHVRFMDAFIEALGLEEVVLVIHDWGSALGFHWAKRNPERVKGIAFMEFIRPIPTWDEWPEFARETFQAFRTTDVGRKLIIDQNVFIEGTLPMGVVRPLTEVEMDHYREPFLNPVDREPLWRFPNELPIAGEPANIVALVEEYMDWLHQSPVPKLLFWGTPGVLIPPAEAARLAKSLPNCKAVDIGPGLNLLQEDNPDLIGSEIARWLSTLEISG

SEQ ID NO: 1334 - protein, 277 aa, Synthetic construct
MFHYVDVGPRDGTPVLFLHGNPTSSLVWRNIIPHVAPTHRCIAPDLIGMGKSDKPDLGYFFDDHVRFMDAFIEALGLEEVVLVIHDWGSALGFHWAKRNPERVKGIAFMEFIRPIPTWDEWPEFARETFQAFRTTDVGRKLIIDQNVFIEGTLPMGVVRPLTEVEMDHYREPFLNPVDREPLWRFPNELPIAGEPANIVALVEEYMDWLHQSPVPKLLFWGTPGVLIPPAEAARLAKSLPNCKAVDIGPGLNLLQEDNPDLIGSEIARWLSTLEISG

SEQ ID NO: 1335 - protein, 277 aa, Synthetic construct
MFHYVDVGPRDGTPVLFLHGNPTSSAVWRNIIPHVAPTHRCIAPDLIGMGKSDKPDLGYFFDDHVRFMDAFIEALGLEEVVLVIHDWGSALGFHWAKRNPERVKGIAFMEFIRPIPTWDEWPEFARETFQAFRTTDVGRKLIIDQNVFIEGTLPMGVVRPLTEVEMDHYREPFLNPVDREPLWRFPNELPIAGEPANIVALVEEYMDWLHQSPVPKLLFWGTPGVLIPPAEAARLAKSLPNCKAVDIGPGLNLLQEDNPDLIGSEIARWLSTLEISG

SEQ ID NO: 1336 - protein, 277 aa, Synthetic construct
MFHYVDVGPRDGTPVLFLHGNPTSSVVWRNIIPHVAPTHRCIAPDLIGMGKSDKPDLGYFFDDHVRFMDAFIEALGLEEVVLVIHDWGSALGFHWAKRNPERVKGIAFMEFIRPIPTWDEWPEFARETFQAFRTTDVGRKLIIDQNVFIEGTLPMGVVRPLTEVEMDHYREPFLNPVDREPLWRFPNELPIAGEPANIVALVEEYMDWLHQSPVPKLLFWGTPGVLIPPAEAARLAKSLPNCKAVDIGPGLNLLQEDNPDLIGSEIARWLSTLEISG

SEQ ID NO: 1337 - protein, 277 aa, Synthetic construct
MFHYVDVGPRDGTPVLFLHGNPTSSWVWRNIIPHVAPTHRCIAPDLIGMGKSDKPDLGYFFDDHVRFMDAFIEALGLEEVVLVIHDWGSALGFHWAKRNPERVKGIAFMEFIRPIPTWDEWPEFARETFQAFRTTDVGRKLIIDQNVFIEGTLPMGVVRPLTEVEMDHYREPFLNPVDREPLWRFPNELPIAGEPANIVALVEEYMDWLHQSPVPKLLFWGTPGVLIPPAEAARLAKSLPNCKAVDIGPGLNLLQEDNPDLIGSEIARWLSTLEISG

SEQ ID NO: 1338 - protein, 277 aa, Synthetic construct
MFHYVDVGPRDGTPVLFLHGNPTSSYLWRNIIPHVAPTHRCIAPDLIGMGKSDKPDLGYFFDDHVRFMDAFIEALGLEEVVLVIHDWGSALGFHWAKRNPERVKGIAFMEFIRPIPTWDEWPEFARETFQAFRTTDVGRKLIIDQNVFIEGTLPMGVVRPLTEVEMDHYREPFLNPVDREPLWRFPNELPIAGEPANIVALVEEYMDWLHQSPVPKLLFWGTPGVLIPPAEAARLAKSLPNCKAVDIGPGLNLLQEDNPDLIGSEIARWLSTLEISG

SEQ ID NO: 1339 - protein, 277 aa, Synthetic construct
MFHYVDVGPRDGTPVLFLHGNPTSSYIWRNIIPHVAPTHRCIAPDLIGMGKSDKPDLGYFFDDHVRFMDAFIEALGLEEVVLVIHDWGSALGFHWAKRNPERVKGIAFMEFIRPIPTWDEWPEFARETFQAFRTTDVGRKLIIDQNVFIEGTLPMGVVRPLTEVEMDHYREPFLNPVDREPLWRFPNELPIAGEPANIVALVEEYMDWLHQSPVPKLLFWGTPGVLIPPAEAARLAKSLPNCKAVDIGPGLNLLQEDNPDLIGSEIARWLSTLEISG

SEQ ID NO: 1340 - protein, 277 aa, Synthetic construct
MFHYVDVGPRDGTPVLFLHGNPTSSYMWRNIIPHVAPTHRCIAPDLIGMGKSDKPDLGYFFDDHVRFMDAFIEALGLEEVVLVIHDWGSALGFHWAKRNPERVKGIAFMEFIRPIPTWDEWPEFARETFQAFRTTDVGRKLIIDQNVFIEGTLPMGVVRPLTEVEMDHYREPFLNPVDREPLWRFPNELPIAGEPANIVALVEEYMDWLHQSPVPKLLFWGTPGVLIPPAEAARLAKSLPNCKAVDIGPGLNLLQEDNPDLIGSEIARWLSTLEISG

SEQ ID NO: 1341 - protein, 277 aa, Synthetic construct
MFHYVDVGPRDGTPVLFLHGNPTSSYTWRNIIPHVAPTHRCIAPDLIGMGKSDKPDLGYFFDDHVRFMDAFIEALGLEEVVLVIHDWGSALGFHWAKRNPERVKGIAFMEFIRPIPTWDEWPEFARETFQAFRTTDVGRKLIIDQNVFIEGTLPMGVVRPLTEVEMDHYREPFLNPVDREPLWRFPNELPIAGEPANIVALVEEYMDWLHQSPVPKLLFWGTPGVLIPPAEAARLAKSLPNCKAVDIGPGLNLLQEDNPDLIGSEIARWLSTLEISG

SEQ ID NO: 1342 - protein, 277 aa, Synthetic construct
MFHYVDVGPRDGTPVLFLHGNPTSSYAWRNIIPHVAPTHRCIAPDLIGMGKSDKPDLGYFFDDHVRFMDAFIEALGLEEVVLVIHDWGSALGFHWAKRNPERVKGIAFMEFIRPIPTWDEWPEFARETFQAFRTTDVGRKLIIDQNVFIEGTLPMGVVRPLTEVEMDHYREPFLNPVDREPLWRFPNELPIAGEPANIVALVEEYMDWLHQSPVPKLLFWGTPGVLIPPAEAARLAKSLPNCKAVDIGPGLNLLQEDNPDLIGSEIARWLSTLEISG

SEQ ID NO: 1343 - protein, 277 aa, Synthetic construct
MFHYVDVGPRDGTPVLFLHGNPTSSYQWRNIIPHVAPTHRCIAPDLIGMGKSDKPDLGYFFDDHVRFMDAFIEALGLEEVVLVIHDWGSALGFHWAKRNPERVKGIAFMEFIRPIPTWDEWPEFARETFQAFRTTDVGRKLIIDQNVFIEGTLPMGVVRPLTEVEMDHYREPFLNPVDREPLWRFPNELPIAGEPANIVALVEEYMDWLHQSPVPKLLFWGTPGVLIPPAEAARLAKSLPNCKAVDIGPGLNLLQEDNPDLIGSEIARWLSTLEISG

SEQ ID NO: 1344 - protein, 277 aa, Synthetic construct
MFHYVDVGPRDGTPVLFLHGNPTSSYVYRNIIPHVAPTHRCIAPDLIGMGKSDKPDLGYFFDDHVRFMDAFIEALGLEEVVLVIHDWGSALGFHWAKRNPERVKGIAFMEFIRPIPTWDEWPEFARETFQAFRTTDVGRKLIIDQNVFIEGTLPMGVVRPLTEVEMDHYREPFLNPVDREPLWRFPNELPIAGEPANIVALVEEYMDWLHQSPVPKLLFWGTPGVLIPPAEAARLAKSLPNCKAVDIGPGLNLLQEDNPDLIGSEIARWLSTLEISG

SEQ ID NO: 1345 - protein, 277 aa, Synthetic construct
MFHYVDVGPRDGTPVLFLHGNPTSSYVFRNIIPHVAPTHRCIAPDLIGMGKSDKPDLGYFFDDHVRFMDAFIEALGLEEVVLVIHDWGSALGFHWAKRNPERVKGIAFMEFIRPIPTWDEWPEFARETFQAFRTTDVGRKLIIDQNVFIEGTLPMGVVRPLTEVEMDHYREPFLNPVDREPLWRFPNELPIAGEPANIVALVEEYMDWLHQSPVPKLLFWGTPGVLIPPAEAARLAKSLPNCKAVDIGPGLNLLQEDNPDLIGSEIARWLSTLEISG

SEQ ID NO: 1346 - protein, 277 aa, Synthetic construct
MFHYVDVGPRDGTPVLFLHGNPTSSYVLRNIIPHVAPTHRCIAPDLIGMGKSDKPDLGYFFDDHVRFMDAFIEALGLEEVVLVIHDWGSALGFHWAKRNPERVKGIAFMEFIRPIPTWDEWPEFARETFQAFRTTDVGRKLIIDQNVFIEGTLPMGVVRPLTEVEMDHYREPFLNPVDREPLWRFPNELPIAGEPANIVALVEEYMDWLHQSPVPKLLFWGTPGVLIPPAEAARLAKSLPNCKAVDIGPGLNLLQEDNPDLIGSEIARWLSTLEISG

SEQ ID NO: 1347 - protein, 277 aa, Synthetic construct
MFHYVDVGPRDGTPVLFLHGNPTSSYVCRNIIPHVAPTHRCIAPDLIGMGKSDKPDLGYFFDDHVRFMDAFIEALGLEEVVLVIHDWGSALGFHWAKRNPERVKGIAFMEFIRPIPTWDEWPEFARETFQAFRTTDVGRKLIIDQNVFIEGTLPMGVVRPLTEVEMDHYREPFLNPVDREPLWRFPNELPIAGEPANIVALVEEYMDWLHQSPVPKLLFWGTPGVLIPPAEAARLAKSLPNCKAVDIGPGLNLLQEDNPDLIGSEIARWLSTLEISG

SEQ ID NO: 1348 - protein, 277 aa, Synthetic construct
MFHYVDVGPRDGTPVLFLHGNPTSSYVHRNIIPHVAPTHRCIAPDLIGMGKSDKPDLGYFFDDHVRFMDAFIEALGLEEVVLVIHDWGSALGFHWAKRNPERVKGIAFMEFIRPIPTWDEWPEFARETFQAFRTTDVGRKLIIDQNVFIEGTLPMGVVRPLTEVEMDHYREPFLNPVDREPLWRFPNELPIAGEPANIVALVEEYMDWLHQSPVPKLLFWGTPGVLIPPAEAARLAKSLPNCKAVDIGPGLNLLQEDNPDLIGSEIARWLSTLEISG

SEQ ID NO: 1349 - protein, 277 aa, Synthetic construct
MFHYVDVGPRDGTPVLFLHGNPTSSYVRRNIIPHVAPTHRCIAPDLIGMGKSDKPDLGYFFDDHVRFMDAFIEALGLEEVVLVIHDWGSALGFHWAKRNPERVKGIAFMEFIRPIPTWDEWPEFARETFQAFRTTDVGRKLIIDQNVFIEGTLPMGVVRPLTEVEMDHYREPFLNPVDREPLWRFPNELPIAGEPANIVALVEEYMDWLHQSPVPKLLFWGTPGVLIPPAEAARLAKSLPNCKAVDIGPGLNLLQEDNPDLIGSEIARWLSTLEISG

SEQ ID NO: 1350 - protein, 277 aa, Synthetic construct
MFHYVDVGPRDGTPVLFLHGNPTSSYVWHNIIPHVAPTHRCIAPDLIGMGKSDKPDLGYFFDDHVRFMDAFIEALGLEEVVLVIHDWGSALGFHWAKRNPERVKGIAFMEFIRPIPTWDEWPEFARETFQAFRTTDVGRKLIIDQNVFIEGTLPMGVVRPLTEVEMDHYREPFLNPVDREPLWRFPNELPIAGEPANIVALVEEYMDWLHQSPVPKLLFWGTPGVLIPPAEAARLAKSLPNCKAVDIGPGLNLLQEDNPDLIGSEIARWLSTLEISG

SEQ ID NO: 1351 - protein, 277 aa, Synthetic construct
MFHYVDVGPRDGTPVLFLHGNPTSSYVWKNIIPHVAPTHRCIAPDLIGMGKSDKPDLGYFFDDHVRFMDAFIEALGLEEVVLVIHDWGSALGFHWAKRNPERVKGIAFMEFIRPIPTWDEWPEFARETFQAFRTTDVGRKLIIDQNVFIEGTLPMGVVRPLTEVEMDHYREPFLNPVDREPLWRFPNELPIAGEPANIVALVEEYMDWLHQSPVPKLLFWGTPGVLIPPAEAARLAKSLPNCKAVDIGPGLNLLQEDNPDLIGSEIARWLSTLEISG

SEQ ID NO: 1352 - protein, 277 aa, Synthetic construct
MFHYVDVGPRDGTPVLFLHGNPTSSYVWSNIIPHVAPTHRCIAPDLIGMGKSDKPDLGYFFDDHVRFMDAFIEALGLEEVVLVIHDWGSALGFHWAKRNPERVKGIAFMEFIRPIPTWDEWPEFARETFQAFRTTDVGRKLIIDQNVFIEGTLPMGVVRPLTEVEMDHYREPFLNPVDREPLWRFPNELPIAGEPANIVALVEEYMDWLHQSPVPKLLFWGTPGVLIPPAEAARLAKSLPNCKAVDIGPGLNLLQEDNPDLIGSEIARWLSTLEISG

SEQ ID NO: 1353 - protein, 277 aa, Synthetic construct
MFHYVDVGPRDGTPVLFLHGNPTSSYVWQNIIPHVAPTHRCIAPDLIGMGKSDKPDLGYFFDDHVRFMDAFIEALGLEEVVLVIHDWGSALGFHWAKRNPERVKGIAFMEFIRPIPTWDEWPEFARETFQAFRTTDVGRKLIIDQNVFIEGTLPMGVVRPLTEVEMDHYREPFLNPVDREPLWRFPNELPIAGEPANIVALVEEYMDWLHQSPVPKLLFWGTPGVLIPPAEAARLAKSLPNCKAVDIGPGLNLLQEDNPDLIGSEIARWLSTLEISG

SEQ ID NO: 1354 - protein, 277 aa, Synthetic construct
MFHYVDVGPRDGTPVLFLHGNPTSSYVWANIIPHVAPTHRCIAPDLIGMGKSDKPDLGYFFDDHVRFMDAFIEALGLEEVVLVIHDWGSALGFHWAKRNPERVKGIAFMEFIRPIPTWDEWPEFARETFQAFRTTDVGRKLIIDQNVFIEGTLPMGVVRPLTEVEMDHYREPFLNPVDREPLWRFPNELPIAGEPANIVALVEEYMDWLHQSPVPKLLFWGTPGVLIPPAEAARLAKSLPNCKAVDIGPGLNLLQEDNPDLIGSEIARWLSTLEISG

SEQ ID NO: 1355 - protein, 277 aa, Synthetic construct
MFHYVDVGPRDGTPVLFLHGNPTSSYVWGNIIPHVAPTHRCIAPDLIGMGKSDKPDLGYFFDDHVRFMDAFIEALGLEEVVLVIHDWGSALGFHWAKRNPERVKGIAFMEFIRPIPTWDEWPEFARETFQAFRTTDVGRKLIIDQNVFIEGTLPMGVVRPLTEVEMDHYREPFLNPVDREPLWRFPNELPIAGEPANIVALVEEYMDWLHQSPVPKLLFWGTPGVLIPPAEAARLAKSLPNCKAVDIGPGLNLLQEDNPDLIGSEIARWLSTLEISG

SEQ ID NO: 1356 - protein, 277 aa, Synthetic construct
MFHYVDVGPRDGTPVLFLHGNPTSSYVWRHIIPHVAPTHRCIAPDLIGMGKSDKPDLGYFFDDHVRFMDAFIEALGLEEVVLVIHDWGSALGFHWAKRNPERVKGIAFMEFIRPIPTWDEWPEFARETFQAFRTTDVGRKLIIDQNVFIEGTLPMGVVRPLTEVEMDHYREPFLNPVDREPLWRFPNELPIAGEPANIVALVEEYMDWLHQSPVPKLLFWGTPGVLIPPAEAARLAKSLPNCKAVDIGPGLNLLQEDNPDLIGSEIARWLSTLEISG

SEQ ID NO: 1357 - protein, 277 aa, Synthetic construct
MFHYVDVGPRDGTPVLFLHGNPTSSYVWRKIIPHVAPTHRCIAPDLIGMGKSDKPDLGYFFDDHVRFMDAFIEALGLEEVVLVIHDWGSALGFHWAKRNPERVKGIAFMEFIRPIPTWDEWPEFARETFQAFRTTDVGRKLIIDQNVFIEGTLPMGVVRPLTEVEMDHYREPFLNPVDREPLWRFPNELPIAGEPANIVALVEEYMDWLHQSPVPKLLFWGTPGVLIPPAEAARLAKSLPNCKAVDIGPGLNLLQEDNPDLIGSEIARWLSTLEISG

SEQ ID NO: 1358 - protein, 277 aa, Synthetic construct
MFHYVDVGPRDGTPVLFLHGNPTSSYVWRDIIPHVAPTHRCIAPDLIGMGKSDKPDLGYFFDDHVRFMDAFIEALGLEEVVLVIHDWGSALGFHWAKRNPERVKGIAFMEFIRPIPTWDEWPEFARETFQAFRTTDVGRKLIIDQNVFIEGTLPMGVVRPLTEVEMDHYREPFLNPVDREPLWRFPNELPIAGEPANIVALVEEYMDWLHQSPVPKLLFWGTPGVLIPPAEAARLAKSLPNCKAVDIGPGLNLLQEDNPDLIGSEIARWLSTLEISG

SEQ ID NO: 1359 - protein, 277 aa, Synthetic construct
MFHYVDVGPRDGTPVLFLHGNPTSSYVWRRIIPHVAPTHRCIAPDLIGMGKSDKPDLGYFFDDHVRFMDAFIEALGLEEVVLVIHDWGSALGFHWAKRNPERVKGIAFMEFIRPIPTWDEWPEFARETFQAFRTTDVGRKLIIDQNVFIEGTLPMGVVRPLTEVEMDHYREPFLNPVDREPLWRFPNELPIAGEPANIVALVEEYMDWLHQSPVPKLLFWGTPGVLIPPAEAARLAKSLPNCKAVDIGPGLNLLQEDNPDLIGSEIARWLSTLEISG

SEQ ID NO: 1360 - protein, 277 aa, Synthetic construct
MFHYVDVGPRDGTPVLFLHGNPTSSYVWRSIIPHVAPTHRCIAPDLIGMGKSDKPDLGYFFDDHVRFMDAFIEALGLEEVVLVIHDWGSALGFHWAKRNPERVKGIAFMEFIRPIPTWDEWPEFARETFQAFRTTDVGRKLIIDQNVFIEGTLPMGVVRPLTEVEMDHYREPFLNPVDREPLWRFPNELPIAGEPANIVALVEEYMDWLHQSPVPKLLFWGTPGVLIPPAEAARLAKSLPNCKAVDIGPGLNLLQEDNPDLIGSEIARWLSTLEISG

SEQ ID NO: 1361 - protein, 277 aa, Synthetic construct
MFHYVDVGPRDGTPVLFLHGNPTSSYVWRGIIPHVAPTHRCIAPDLIGMGKSDKPDLGYFFDDHVRFMDAFIEALGLEEVVLVIHDWGSALGFHWAKRNPERVKGIAFMEFIRPIPTWDEWPEFARETFQAFRTTDVGRKLIIDQNVFIEGTLPMGVVRPLTEVEMDHYREPFLNPVDREPLWRFPNELPIAGEPANIVALVEEYMDWLHQSPVPKLLFWGTPGVLIPPAEAARLAKSLPNCKAVDIGPGLNLLQEDNPDLIGSEIARWLSTLEISG

SEQ ID NO: 1362 - protein, 277 aa, Synthetic construct
MFHYVDVGPRDGTPVLFLHGNPTSSYVWRNVIPHVAPTHRCIAPDLIGMGKSDKPDLGYFFDDHVRFMDAFIEALGLEEVVLVIHDWGSALGFHWAKRNPERVKGIAFMEFIRPIPTWDEWPEFARETFQAFRTTDVGRKLIIDQNVFIEGTLPMGVVRPLTEVEMDHYREPFLNPVDREPLWRFPNELPIAGEPANIVALVEEYMDWLHQSPVPKLLFWGTPGVLIPPAEAARLAKSLPNCKAVDIGPGLNLLQEDNPDLIGSEIARWLSTLEISG

SEQ ID NO: 1363 - protein, 277 aa, Synthetic construct
MFHYVDVGPRDGTPVLFLHGNPTSSYVWRNLIPHVAPTHRCIAPDLIGMGKSDKPDLGYFFDDHVRFMDAFIEALGLEEVVLVIHDWGSALGFHWAKRNPERVKGIAFMEFIRPIPTWDEWPEFARETFQAFRTTDVGRKLIIDQNVFIEGTLPMGVVRPLTEVEMDHYREPFLNPVDREPLWRFPNELPIAGEPANIVALVEEYMDWLHQSPVPKLLFWGTPGVLIPPAEAARLAKSLPNCKAVDIGPGLNLLQEDNPDLIGSEIARWLSTLEISG

SEQ ID NO: 1364 - protein, 277 aa, Synthetic construct
MFHYVDVGPRDGTPVLFLHGNPTSSYVWRNMIPHVAPTHRCIAPDLIGMGKSDKPDLGYFFDDHVRFMDAFIEALGLEEVVLVIHDWGSALGFHWAKRNPERVKGIAFMEFIRPIPTWDEWPEFARETFQAFRTTDVGRKLIIDQNVFIEGTLPMGVVRPLTEVEMDHYREPFLNPVDREPLWRFPNELPIAGEPANIVALVEEYMDWLHQSPVPKLLFWGTPGVLIPPAEAARLAKSLPNCKAVDIGPGLNLLQEDNPDLIGSEIARWLSTLEISG

SEQ ID NO: 1365 - protein, 277 aa, Synthetic construct
MFHYVDVGPRDGTPVLFLHGNPTSSYVWRNAIPHVAPTHRCIAPDLIGMGKSDKPDLGYFFDDHVRFMDAFIEALGLEEVVLVIHDWGSALGFHWAKRNPERVKGIAFMEFIRPIPTWDEWPEFARETFQAFRTTDVGRKLIIDQNVFIEGTLPMGVVRPLTEVEMDHYREPFLNPVDREPLWRFPNELPIAGEPANIVALVEEYMDWLHQSPVPKLLFWGTPGVLIPPAEAARLAKSLPNCKAVDIGPGLNLLQEDNPDLIGSEIARWLSTLEISG

SEQ ID NO: 1366 - protein, 277 aa, Synthetic construct
MFHYVDVGPRDGTPVLFLHGNPTSSYVWRNFIPHVAPTHRCIAPDLIGMGKSDKPDLGYFFDDHVRFMDAFIEALGLEEVVLVIHDWGSALGFHWAKRNPERVKGIAFMEFIRPIPTWDEWPEFARETFQAFRTTDVGRKLIIDQNVFIEGTLPMGVVRPLTEVEMDHYREPFLNPVDREPLWRFPNELPIAGEPANIVALVEEYMDWLHQSPVPKLLFWGTPGVLIPPAEAARLAKSLPNCKAVDIGPGLNLLQEDNPDLIGSEIARWLSTLEISG

SEQ ID NO: 1367 - protein, 277 aa, Synthetic construct
MFHYVDVGPRDGTPVLFLHGNPTSSYVWRNTIPHVAPTHRCIAPDLIGMGKSDKPDLGYFFDDHVRFMDAFIEALGLEEVVLVIHDWGSALGFHWAKRNPERVKGIAFMEFIRPIPTWDEWPEFARETFQAFRTTDVGRKLIIDQNVFIEGTLPMGVVRPLTEVEMDHYREPFLNPVDREPLWRFPNELPIAGEPANIVALVEEYMDWLHQSPVPKLLFWGTPGVLIPPAEAARLAKSLPNCKAVDIGPGLNLLQEDNPDLIGSEIARWLSTLEISG

SEQ ID NO: 1368 - protein, 277 aa, Synthetic construct
MFHYVDVGPRDGTPVLFLHGNPTSSYVWRNILPHVAPTHRCIAPDLIGMGKSDKPDLGYFFDDHVRFMDAFIEALGLEEVVLVIHDWGSALGFHWAKRNPERVKGIAFMEFIRPIPTWDEWPEFARETFQAFRTTDVGRKLIIDQNVFIEGTLPMGVVRPLTEVEMDHYREPFLNPVDREPLWRFPNELPIAGEPANIVALVEEYMDWLHQSPVPKLLFWGTPGVLIPPAEAARLAKSLPNCKAVDIGPGLNLLQEDNPDLIGSEIARWLSTLEISG

SEQ ID NO: 1369 - protein, 277 aa, Synthetic construct
MFHYVDVGPRDGTPVLFLHGNPTSSYVWRNIMPHVAPTHRCIAPDLIGMGKSDKPDLGYFFDDHVRFMDAFIEALGLEEVVLVIHDWGSALGFHWAKRNPERVKGIAFMEFIRPIPTWDEWPEFARETFQAFRTTDVGRKLIIDQNVFIEGTLPMGVVRPLTEVEMDHYREPFLNPVDREPLWRFPNELPIAGEPANIVALVEEYMDWLHQSPVPKLLFWGTPGVLIPPAEAARLAKSLPNCKAVDIGPGLNLLQEDNPDLIGSEIARWLSTLEISG

SEQ ID NO: 1370 - protein, 277 aa, Synthetic construct
MFHYVDVGPRDGTPVLFLHGNPTSSYVWRNIVPHVAPTHRCIAPDLIGMGKSDKPDLGYFFDDHVRFMDAFIEALGLEEVVLVIHDWGSALGFHWAKRNPERVKGIAFMEFIRPIPTWDEWPEFARETFQAFRTTDVGRKLIIDQNVFIEGTLPMGVVRPLTEVEMDHYREPFLNPVDREPLWRFPNELPIAGEPANIVALVEEYMDWLHQSPVPKLLFWGTPGVLIPPAEAARLAKSLPNCKAVDIGPGLNLLQEDNPDLIGSEIARWLSTLEISG

SEQ ID NO: 1371 - protein, 277 aa, Synthetic construct
MFHYVDVGPRDGTPVLFLHGNPTSSYVWRNIAPHVAPTHRCIAPDLIGMGKSDKPDLGYFFDDHVRFMDAFIEALGLEEVVLVIHDWGSALGFHWAKRNPERVKGIAFMEFIRPIPTWDEWPEFARETFQAFRTTDVGRKLIIDQNVFIEGTLPMGVVRPLTEVEMDHYREPFLNPVDREPLWRFPNELPIAGEPANIVALVEEYMDWLHQSPVPKLLFWGTPGVLIPPAEAARLAKSLPNCKAVDIGPGLNLLQEDNPDLIGSEIARWLSTLEISG

SEQ ID NO: 1372 - protein, 277 aa, Synthetic construct
MFHYVDVGPRDGTPVLFLHGNPTSSYVWRNIFPHVAPTHRCIAPDLIGMGKSDKPDLGYFFDDHVRFMDAFIEALGLEEVVLVIHDWGSALGFHWAKRNPERVKGIAFMEFIRPIPTWDEWPEFARETFQAFRTTDVGRKLIIDQNVFIEGTLPMGVVRPLTEVEMDHYREPFLNPVDREPLWRFPNELPIAGEPANIVALVEEYMDWLHQSPVPKLLFWGTPGVLIPPAEAARLAKSLPNCKAVDIGPGLNLLQEDNPDLIGSEIARWLSTLEISG

SEQ ID NO: 1373 - protein, 277 aa, Synthetic construct
MFHYVDVGPRDGTPVLFLHGNPTSSYVWRNITPHVAPTHRCIAPDLIGMGKSDKPDLGYFFDDHVRFMDAFIEALGLEEVVLVIHDWGSALGFHWAKRNPERVKGIAFMEFIRPIPTWDEWPEFARETFQAFRTTDVGRKLIIDQNVFIEGTLPMGVVRPLTEVEMDHYREPFLNPVDREPLWRFPNELPIAGEPANIVALVEEYMDWLHQSPVPKLLFWGTPGVLIPPAEAARLAKSLPNCKAVDIGPGLNLLQEDNPDLIGSEIARWLSTLEISG

SEQ ID NO: 1374 - protein, 277 aa, Synthetic construct
MFHYVDVGPRDGTPVLFLHGNPTSSYVWRNIIAHVAPTHRCIAPDLIGMGKSDKPDLGYFFDDHVRFMDAFIEALGLEEVVLVIHDWGSALGFHWAKRNPERVKGIAFMEFIRPIPTWDEWPEFARETFQAFRTTDVGRKLIIDQNVFIEGTLPMGVVRPLTEVEMDHYREPFLNPVDREPLWRFPNELPIAGEPANIVALVEEYMDWLHQSPVPKLLFWGTPGVLIPPAEAARLAKSLPNCKAVDIGPGLNLLQEDNPDLIGSEIARWLSTLEISG

SEQ ID NO: 1375 - protein, 277 aa, Synthetic construct
MFHYVDVGPRDGTPVLFLHGNPTSSYVWRNIIRHVAPTHRCIAPDLIGMGKSDKPDLGYFFDDHVRFMDAFIEALGLEEVVLVIHDWGSALGFHWAKRNPERVKGIAFMEFIRPIPTWDEWPEFARETFQAFRTTDVGRKLIIDQNVFIEGTLPMGVVRPLTEVEMDHYREPFLNPVDREPLWRFPNELPIAGEPANIVALVEEYMDWLHQSPVPKLLFWGTPGVLIPPAEAARLAKSLPNCKAVDIGPGLNLLQEDNPDLIGSEIARWLSTLEISG

SEQ ID NO: 1376 - protein, 277 aa, Synthetic construct
MFHYVDVGPRDGTPVLFLHGNPTSSYVWRNIISHVAPTHRCIAPDLIGMGKSDKPDLGYFFDDHVRFMDAFIEALGLEEVVLVIHDWGSALGFHWAKRNPERVKGIAFMEFIRPIPTWDEWPEFARETFQAFRTTDVGRKLIIDQNVFIEGTLPMGVVRPLTEVEMDHYREPFLNPVDREPLWRFPNELPIAGEPANIVALVEEYMDWLHQSPVPKLLFWGTPGVLIPPAEAARLAKSLPNCKAVDIGPGLNLLQEDNPDLIGSEIARWLSTLEISG

SEQ ID NO: 1377 - protein, 277 aa, Synthetic construct
MFHYVDVGPRDGTPVLFLHGNPTSSYVWRNIIKHVAPTHRCIAPDLIGMGKSDKPDLGYFFDDHVRFMDAFIEALGLEEVVLVIHDWGSALGFHWAKRNPERVKGIAFMEFIRPIPTWDEWPEFARETFQAFRTTDVGRKLIIDQNVFIEGTLPMGVVRPLTEVEMDHYREPFLNPVDREPLWRFPNELPIAGEPANIVALVEEYMDWLHQSPVPKLLFWGTPGVLIPPAEAARLAKSLPNCKAVDIGPGLNLLQEDNPDLIGSEIARWLSTLEISG

SEQ ID NO: 1378 - protein, 277 aa, Synthetic construct
MFHYVDVGPRDGTPVLFLHGNPTSSYVWRNIIGHVAPTHRCIAPDLIGMGKSDKPDLGYFFDDHVRFMDAFIEALGLEEVVLVIHDWGSALGFHWAKRNPERVKGIAFMEFIRPIPTWDEWPEFARETFQAFRTTDVGRKLIIDQNVFIEGTLPMGVVRPLTEVEMDHYREPFLNPVDREPLWRFPNELPIAGEPANIVALVEEYMDWLHQSPVPKLLFWGTPGVLIPPAEAARLAKSLPNCKAVDIGPGLNLLQEDNPDLIGSEIARWLSTLEISG

SEQ ID NO: 1379 - protein, 277 aa, Synthetic construct
MFHYVDVGPRDGTPVLFLHGNPTSSYVWRNIIEHVAPTHRCIAPDLIGMGKSDKPDLGYFFDDHVRFMDAFIEALGLEEVVLVIHDWGSALGFHWAKRNPERVKGIAFMEFIRPIPTWDEWPEFARETFQAFRTTDVGRKLIIDQNVFIEGTLPMGVVRPLTEVEMDHYREPFLNPVDREPLWRFPNELPIAGEPANIVALVEEYMDWLHQSPVPKLLFWGTPGVLIPPAEAARLAKSLPNCKAVDIGPGLNLLQEDNPDLIGSEIARWLSTLEISG

SEQ ID NO: 1380 - protein, 277 aa, Synthetic construct
MFHYVDVGPRDGTPVLFLHGNPTSSYVWRNIIPYVAPTHRCIAPDLIGMGKSDKPDLGYFFDDHVRFMDAFIEALGLEEVVLVIHDWGSALGFHWAKRNPERVKGIAFMEFIRPIPTWDEWPEFARETFQAFRTTDVGRKLIIDQNVFIEGTLPMGVVRPLTEVEMDHYREPFLNPVDREPLWRFPNELPIAGEPANIVALVEEYMDWLHQSPVPKLLFWGTPGVLIPPAEAARLAKSLPNCKAVDIGPGLNLLQEDNPDLIGSEIARWLSTLEISG

SEQ ID NO: 1381 - protein, 277 aa, Synthetic construct
MFHYVDVGPRDGTPVLFLHGNPTSSYVWRNIIPAVAPTHRCIAPDLIGMGKSDKPDLGYFFDDHVRFMDAFIEALGLEEVVLVIHDWGSALGFHWAKRNPERVKGIAFMEFIRPIPTWDEWPEFARETFQAFRTTDVGRKLIIDQNVFIEGTLPMGVVRPLTEVEMDHYREPFLNPVDREPLWRFPNELPIAGEPANIVALVEEYMDWLHQSPVPKLLFWGTPGVLIPPAEAARLAKSLPNCKAVDIGPGLNLLQEDNPDLIGSEIARWLSTLEISG

SEQ ID NO: 1382 - protein, 277 aa, Synthetic construct
MFHYVDVGPRDGTPVLFLHGNPTSSYVWRNIIPRVAPTHRCIAPDLIGMGKSDKPDLGYFFDDHVRFMDAFIEALGLEEVVLVIHDWGSALGFHWAKRNPERVKGIAFMEFIRPIPTWDEWPEFARETFQAFRTTDVGRKLIIDQNVFIEGTLPMGVVRPLTEVEMDHYREPFLNPVDREPLWRFPNELPIAGEPANIVALVEEYMDWLHQSPVPKLLFWGTPGVLIPPAEAARLAKSLPNCKAVDIGPGLNLLQEDNPDLIGSEIARWLSTLEISG

SEQ ID NO: 1383 - protein, 277 aa, Synthetic construct
MFHYVDVGPRDGTPVLFLHGNPTSSYVWRNIIPFVAPTHRCIAPDLIGMGKSDKPDLGYFFDDHVRFMDAFIEALGLEEVVLVIHDWGSALGFHWAKRNPERVKGIAFMEFIRPIPTWDEWPEFARETFQAFRTTDVGRKLIIDQNVFIEGTLPMGVVRPLTEVEMDHYREPFLNPVDREPLWRFPNELPIAGEPANIVALVEEYMDWLHQSPVPKLLFWGTPGVLIPPAEAARLAKSLPNCKAVDIGPGLNLLQEDNPDLIGSEIARWLSTLEISG

SEQ ID NO: 1384 - protein, 277 aa, Synthetic construct
MFHYVDVGPRDGTPVLFLHGNPTSSYVWRNIIPQVAPTHRCIAPDLIGMGKSDKPDLGYFFDDHVRFMDAFIEALGLEEVVLVIHDWGSALGFHWAKRNPERVKGIAFMEFIRPIPTWDEWPEFARETFQAFRTTDVGRKLIIDQNVFIEGTLPMGVVRPLTEVEMDHYREPFLNPVDREPLWRFPNELPIAGEPANIVALVEEYMDWLHQSPVPKLLFWGTPGVLIPPAEAARLAKSLPNCKAVDIGPGLNLLQEDNPDLIGSEIARWLSTLEISG

SEQ ID NO: 1385 - protein, 277 aa, Synthetic construct
MFHYVDVGPRDGTPVLFLHGNPTSSYVWRNIIPLVAPTHRCIAPDLIGMGKSDKPDLGYFFDDHVRFMDAFIEALGLEEVVLVIHDWGSALGFHWAKRNPERVKGIAFMEFIRPIPTWDEWPEFARETFQAFRTTDVGRKLIIDQNVFIEGTLPMGVVRPLTEVEMDHYREPFLNPVDREPLWRFPNELPIAGEPANIVALVEEYMDWLHQSPVPKLLFWGTPGVLIPPAEAARLAKSLPNCKAVDIGPGLNLLQEDNPDLIGSEIARWLSTLEISG

SEQ ID NO: 1386 - protein, 277 aa, Synthetic construct
MFHYVDVGPRDGTPVLFLHGNPTSSYVWRNIIPHLAPTHRCIAPDLIGMGKSDKPDLGYFFDDHVRFMDAFIEALGLEEVVLVIHDWGSALGFHWAKRNPERVKGIAFMEFIRPIPTWDEWPEFARETFQAFRTTDVGRKLIIDQNVFIEGTLPMGVVRPLTEVEMDHYREPFLNPVDREPLWRFPNELPIAGEPANIVALVEEYMDWLHQSPVPKLLFWGTPGVLIPPAEAARLAKSLPNCKAVDIGPGLNLLQEDNPDLIGSEIARWLSTLEISG

SEQ ID NO: 1387 - protein, 277 aa, Synthetic construct
MFHYVDVGPRDGTPVLFLHGNPTSSYVWRNIIPHIAPTHRCIAPDLIGMGKSDKPDLGYFFDDHVRFMDAFIEALGLEEVVLVIHDWGSALGFHWAKRNPERVKGIAFMEFIRPIPTWDEWPEFARETFQAFRTTDVGRKLIIDQNVFIEGTLPMGVVRPLTEVEMDHYREPFLNPVDREPLWRFPNELPIAGEPANIVALVEEYMDWLHQSPVPKLLFWGTPGVLIPPAEAARLAKSLPNCKAVDIGPGLNLLQEDNPDLIGSEIARWLSTLEISG

SEQ ID NO: 1388 - protein, 277 aa, Synthetic construct
MFHYVDVGPRDGTPVLFLHGNPTSSYVWRNIIPHFAPTHRCIAPDLIGMGKSDKPDLGYFFDDHVRFMDAFIEALGLEEVVLVIHDWGSALGFHWAKRNPERVKGIAFMEFIRPIPTWDEWPEFARETFQAFRTTDVGRKLIIDQNVFIEGTLPMGVVRPLTEVEMDHYREPFLNPVDREPLWRFPNELPIAGEPANIVALVEEYMDWLHQSPVPKLLFWGTPGVLIPPAEAARLAKSLPNCKAVDIGPGLNLLQEDNPDLIGSEIARWLSTLEISG

SEQ ID NO: 1389 - protein, 277 aa, Synthetic construct
MFHYVDVGPRDGTPVLFLHGNPTSSYVWRNIIPHAAPTHRCIAPDLIGMGKSDKPDLGYFFDDHVRFMDAFIEALGLEEVVLVIHDWGSALGFHWAKRNPERVKGIAFMEFIRPIPTWDEWPEFARETFQAFRTTDVGRKLIIDQNVFIEGTLPMGVVRPLTEVEMDHYREPFLNPVDREPLWRFPNELPIAGEPANIVALVEEYMDWLHQSPVPKLLFWGTPGVLIPPAEAARLAKSLPNCKAVDIGPGLNLLQEDNPDLIGSEIARWLSTLEISG

SEQ ID NO: 1390 - protein, 277 aa, Synthetic construct
MFHYVDVGPRDGTPVLFLHGNPTSSYVWRNIIPHMAPTHRCIAPDLIGMGKSDKPDLGYFFDDHVRFMDAFIEALGLEEVVLVIHDWGSALGFHWAKRNPERVKGIAFMEFIRPIPTWDEWPEFARETFQAFRTTDVGRKLIIDQNVFIEGTLPMGVVRPLTEVEMDHYREPFLNPVDREPLWRFPNELPIAGEPANIVALVEEYMDWLHQSPVPKLLFWGTPGVLIPPAEAARLAKSLPNCKAVDIGPGLNLLQEDNPDLIGSEIARWLSTLEISG

SEQ ID NO: 1391 - protein, 277 aa, Synthetic construct
MFHYVDVGPRDGTPVLFLHGNPTSSYVWRNIIPHTAPTHRCIAPDLIGMGKSDKPDLGYFFDDHVRFMDAFIEALGLEEVVLVIHDWGSALGFHWAKRNPERVKGIAFMEFIRPIPTWDEWPEFARETFQAFRTTDVGRKLIIDQNVFIEGTLPMGVVRPLTEVEMDHYREPFLNPVDREPLWRFPNELPIAGEPANIVALVEEYMDWLHQSPVPKLLFWGTPGVLIPPAEAARLAKSLPNCKAVDIGPGLNLLQEDNPDLIGSEIARWLSTLEISG

SEQ ID NO: 1392 - protein, 277 aa, Synthetic construct
MFHYVDVGPRDGTPVLFLHGNPTSSYVWRNIIPHVSPTHRCIAPDLIGMGKSDKPDLGYFFDDHVRFMDAFIEALGLEEVVLVIHDWGSALGFHWAKRNPERVKGIAFMEFIRPIPTWDEWPEFARETFQAFRTTDVGRKLIIDQNVFIEGTLPMGVVRPLTEVEMDHYREPFLNPVDREPLWRFPNELPIAGEPANIVALVEEYMDWLHQSPVPKLLFWGTPGVLIPPAEAARLAKSLPNCKAVDIGPGLNLLQEDNPDLIGSEIARWLSTLEISG

SEQ ID NO: 1393 - protein, 277 aa, Synthetic construct
MFHYVDVGPRDGTPVLFLHGNPTSSYVWRNIIPHVTPTHRCIAPDLIGMGKSDKPDLGYFFDDHVRFMDAFIEALGLEEVVLVIHDWGSALGFHWAKRNPERVKGIAFMEFIRPIPTWDEWPEFARETFQAFRTTDVGRKLIIDQNVFIEGTLPMGVVRPLTEVEMDHYREPFLNPVDREPLWRFPNELPIAGEPANIVALVEEYMDWLHQSPVPKLLFWGTPGVLIPPAEAARLAKSLPNCKAVDIGPGLNLLQEDNPDLIGSEIARWLSTLEISG

SEQ ID NO: 1394 - protein, 277 aa, Synthetic construct
MFHYVDVGPRDGTPVLFLHGNPTSSYVWRNIIPHVEPTHRCIAPDLIGMGKSDKPDLGYFFDDHVRFMDAFIEALGLEEVVLVIHDWGSALGFHWAKRNPERVKGIAFMEFIRPIPTWDEWPEFARETFQAFRTTDVGRKLIIDQNVFIEGTLPMGVVRPLTEVEMDHYREPFLNPVDREPLWRFPNELPIAGEPANIVALVEEYMDWLHQSPVPKLLFWGTPGVLIPPAEAARLAKSLPNCKAVDIGPGLNLLQEDNPDLIGSEIARWLSTLEISG

SEQ ID NO: 1395 - protein, 277 aa, Synthetic construct
MFHYVDVGPRDGTPVLFLHGNPTSSYVWRNIIPHVGPTHRCIAPDLIGMGKSDKPDLGYFFDDHVRFMDAFIEALGLEEVVLVIHDWGSALGFHWAKRNPERVKGIAFMEFIRPIPTWDEWPEFARETFQAFRTTDVGRKLIIDQNVFIEGTLPMGVVRPLTEVEMDHYREPFLNPVDREPLWRFPNELPIAGEPANIVALVEEYMDWLHQSPVPKLLFWGTPGVLIPPAEAARLAKSLPNCKAVDIGPGLNLLQEDNPDLIGSEIARWLSTLEISG

SEQ ID NO: 1396 - protein, 277 aa, Synthetic construct
MFHYVDVGPRDGTPVLFLHGNPTSSYVWRNIIPHVQPTHRCIAPDLIGMGKSDKPDLGYFFDDHVRFMDAFIEALGLEEVVLVIHDWGSALGFHWAKRNPERVKGIAFMEFIRPIPTWDEWPEFARETFQAFRTTDVGRKLIIDQNVFIEGTLPMGVVRPLTEVEMDHYREPFLNPVDREPLWRFPNELPIAGEPANIVALVEEYMDWLHQSPVPKLLFWGTPGVLIPPAEAARLAKSLPNCKAVDIGPGLNLLQEDNPDLIGSEIARWLSTLEISG

SEQ ID NO: 1397 - protein, 277 aa, Synthetic construct
MFHYVDVGPRDGTPVLFLHGNPTSSYVWRNIIPHVLPTHRCIAPDLIGMGKSDKPDLGYFFDDHVRFMDAFIEALGLEEVVLVIHDWGSALGFHWAKRNPERVKGIAFMEFIRPIPTWDEWPEFARETFQAFRTTDVGRKLIIDQNVFIEGTLPMGVVRPLTEVEMDHYREPFLNPVDREPLWRFPNELPIAGEPANIVALVEEYMDWLHQSPVPKLLFWGTPGVLIPPAEAARLAKSLPNCKAVDIGPGLNLLQEDNPDLIGSEIARWLSTLEISG

SEQ ID NO: 1398 - protein, 277 aa, Synthetic construct
MFHYVDVGPRDGTPVLFLHGNPTSSYVWRNIIPHVAATHRCIAPDLIGMGKSDKPDLGYFFDDHVRFMDAFIEALGLEEVVLVIHDWGSALGFHWAKRNPERVKGIAFMEFIRPIPTWDEWPEFARETFQAFRTTDVGRKLIIDQNVFIEGTLPMGVVRPLTEVEMDHYREPFLNPVDREPLWRFPNELPIAGEPANIVALVEEYMDWLHQSPVPKLLFWGTPGVLIPPAEAARLAKSLPNCKAVDIGPGLNLLQEDNPDLIGSEIARWLSTLEISG

SEQ ID NO: 1399 - protein, 277 aa, Synthetic construct
MFHYVDVGPRDGTPVLFLHGNPTSSYVWRNIIPHVAETHRCIAPDLIGMGKSDKPDLGYFFDDHVRFMDAFIEALGLEEVVLVIHDWGSALGFHWAKRNPERVKGIAFMEFIRPIPTWDEWPEFARETFQAFRTTDVGRKLIIDQNVFIEGTLPMGVVRPLTEVEMDHYREPFLNPVDREPLWRFPNELPIAGEPANIVALVEEYMDWLHQSPVPKLLFWGTPGVLIPPAEAARLAKSLPNCKAVDIGPGLNLLQEDNPDLIGSEIARWLSTLEISG

SEQ ID NO: 1400 - protein, 277 aa, Synthetic construct
MFHYVDVGPRDGTPVLFLHGNPTSSYVWRNIIPHVAKTHRCIAPDLIGMGKSDKPDLGYFFDDHVRFMDAFIEALGLEEVVLVIHDWGSALGFHWAKRNPERVKGIAFMEFIRPIPTWDEWPEFARETFQAFRTTDVGRKLIIDQNVFIEGTLPMGVVRPLTEVEMDHYREPFLNPVDREPLWRFPNELPIAGEPANIVALVEEYMDWLHQSPVPKLLFWGTPGVLIPPAEAARLAKSLPNCKAVDIGPGLNLLQEDNPDLIGSEIARWLSTLEISG

SEQ ID NO: 1401 - protein, 277 aa, Synthetic construct
MFHYVDVGPRDGTPVLFLHGNPTSSYVWRNIIPHVAGTHRCIAPDLIGMGKSDKPDLGYFFDDHVRFMDAFIEALGLEEVVLVIHDWGSALGFHWAKRNPERVKGIAFMEFIRPIPTWDEWPEFARETFQAFRTTDVGRKLIIDQNVFIEGTLPMGVVRPLTEVEMDHYREPFLNPVDREPLWRFPNELPIAGEPANIVALVEEYMDWLHQSPVPKLLFWGTPGVLIPPAEAARLAKSLPNCKAVDIGPGLNLLQEDNPDLIGSEIARWLSTLEISG

SEQ ID NO: 1402 - protein, 277 aa, Synthetic construct
MFHYVDVGPRDGTPVLFLHGNPTSSYVWRNIIPHVASTHRCIAPDLIGMGKSDKPDLGYFFDDHVRFMDAFIEALGLEEVVLVIHDWGSALGFHWAKRNPERVKGIAFMEFIRPIPTWDEWPEFARETFQAFRTTDVGRKLIIDQNVFIEGTLPMGVVRPLTEVEMDHYREPFLNPVDREPLWRFPNELPIAGEPANIVALVEEYMDWLHQSPVPKLLFWGTPGVLIPPAEAARLAKSLPNCKAVDIGPGLNLLQEDNPDLIGSEIARWLSTLEISG

SEQ ID NO: 1403 - protein, 277 aa, Synthetic construct
MFHYVDVGPRDGTPVLFLHGNPTSSYVWRNIIPHVADTHRCIAPDLIGMGKSDKPDLGYFFDDHVRFMDAFIEALGLEEVVLVIHDWGSALGFHWAKRNPERVKGIAFMEFIRPIPTWDEWPEFARETFQAFRTTDVGRKLIIDQNVFIEGTLPMGVVRPLTEVEMDHYREPFLNPVDREPLWRFPNELPIAGEPANIVALVEEYMDWLHQSPVPKLLFWGTPGVLIPPAEAARLAKSLPNCKAVDIGPGLNLLQEDNPDLIGSEIARWLSTLEISG

SEQ ID NO: 1404 - protein, 277 aa, Synthetic construct
MFHYVDVGPRDGTPVLFLHGNPTSSYVWRNIIPHVAPHHRCIAPDLIGMGKSDKPDLGYFFDDHVRFMDAFIEALGLEEVVLVIHDWGSALGFHWAKRNPERVKGIAFMEFIRPIPTWDEWPEFARETFQAFRTTDVGRKLIIDQNVFIEGTLPMGVVRPLTEVEMDHYREPFLNPVDREPLWRFPNELPIAGEPANIVALVEEYMDWLHQSPVPKLLFWGTPGVLIPPAEAARLAKSLPNCKAVDIGPGLNLLQEDNPDLIGSEIARWLSTLEISG

SEQ ID NO: 1405 - protein, 277 aa, Synthetic construct
MFHYVDVGPRDGTPVLFLHGNPTSSYVWRNIIPHVAPSHRCIAPDLIGMGKSDKPDLGYFFDDHVRFMDAFIEALGLEEVVLVIHDWGSALGFHWAKRNPERVKGIAFMEFIRPIPTWDEWPEFARETFQAFRTTDVGRKLIIDQNVFIEGTLPMGVVRPLTEVEMDHYREPFLNPVDREPLWRFPNELPIAGEPANIVALVEEYMDWLHQSPVPKLLFWGTPGVLIPPAEAARLAKSLPNCKAVDIGPGLNLLQEDNPDLIGSEIARWLSTLEISG

SEQ ID NO: 1406 - protein, 277 aa, Synthetic construct
MFHYVDVGPRDGTPVLFLHGNPTSSYVWRNIIPHVAPDHRCIAPDLIGMGKSDKPDLGYFFDDHVRFMDAFIEALGLEEVVLVIHDWGSALGFHWAKRNPERVKGIAFMEFIRPIPTWDEWPEFARETFQAFRTTDVGRKLIIDQNVFIEGTLPMGVVRPLTEVEMDHYREPFLNPVDREPLWRFPNELPIAGEPANIVALVEEYMDWLHQSPVPKLLFWGTPGVLIPPAEAARLAKSLPNCKAVDIGPGLNLLQEDNPDLIGSEIARWLSTLEISG

SEQ ID NO: 1407 - protein, 277 aa, Synthetic construct
MFHYVDVGPRDGTPVLFLHGNPTSSYVWRNIIPHVAPRHRCIAPDLIGMGKSDKPDLGYFFDDHVRFMDAFIEALGLEEVVLVIHDWGSALGFHWAKRNPERVKGIAFMEFIRPIPTWDEWPEFARETFQAFRTTDVGRKLIIDQNVFIEGTLPMGVVRPLTEVEMDHYREPFLNPVDREPLWRFPNELPIAGEPANIVALVEEYMDWLHQSPVPKLLFWGTPGVLIPPAEAARLAKSLPNCKAVDIGPGLNLLQEDNPDLIGSEIARWLSTLEISG

SEQ ID NO: 1408 - protein, 277 aa, Synthetic construct
MFHYVDVGPRDGTPVLFLHGNPTSSYVWRNIIPHVAPQHRCIAPDLIGMGKSDKPDLGYFFDDHVRFMDAFIEALGLEEVVLVIHDWGSALGFHWAKRNPERVKGIAFMEFIRPIPTWDEWPEFARETFQAFRTTDVGRKLIIDQNVFIEGTLPMGVVRPLTEVEMDHYREPFLNPVDREPLWRFPNELPIAGEPANIVALVEEYMDWLHQSPVPKLLFWGTPGVLIPPAEAARLAKSLPNCKAVDIGPGLNLLQEDNPDLIGSEIARWLSTLEISG

SEQ ID NO: 1409 - protein, 277 aa, Synthetic construct
MFHYVDVGPRDGTPVLFLHGNPTSSYVWRNIIPHVAPNHRCIAPDLIGMGKSDKPDLGYFFDDHVRFMDAFIEALGLEEVVLVIHDWGSALGFHWAKRNPERVKGIAFMEFIRPIPTWDEWPEFARETFQAFRTTDVGRKLIIDQNVFIEGTLPMGVVRPLTEVEMDHYREPFLNPVDREPLWRFPNELPIAGEPANIVALVEEYMDWLHQSPVPKLLFWGTPGVLIPPAEAARLAKSLPNCKAVDIGPGLNLLQEDNPDLIGSEIARWLSTLEISG

SEQ ID NO: 1410 - protein, 277 aa, Synthetic construct
MFHYVDVGPRDGTPVLFLHGNPTSSYVWRNIIPHVAPTARCIAPDLIGMGKSDKPDLGYFFDDHVRFMDAFIEALGLEEVVLVIHDWGSALGFHWAKRNPERVKGIAFMEFIRPIPTWDEWPEFARETFQAFRTTDVGRKLIIDQNVFIEGTLPMGVVRPLTEVEMDHYREPFLNPVDREPLWRFPNELPIAGEPANIVALVEEYMDWLHQSPVPKLLFWGTPGVLIPPAEAARLAKSLPNCKAVDIGPGLNLLQEDNPDLIGSEIARWLSTLEISG

SEQ ID NO: 1411 - protein, 277 aa, Synthetic construct
MFHYVDVGPRDGTPVLFLHGNPTSSYVWRNIIPHVAPTGRCIAPDLIGMGKSDKPDLGYFFDDHVRFMDAFIEALGLEEVVLVIHDWGSALGFHWAKRNPERVKGIAFMEFIRPIPTWDEWPEFARETFQAFRTTDVGRKLIIDQNVFIEGTLPMGVVRPLTEVEMDHYREPFLNPVDREPLWRFPNELPIAGEPANIVALVEEYMDWLHQSPVPKLLFWGTPGVLIPPAEAARLAKSLPNCKAVDIGPGLNLLQEDNPDLIGSEIARWLSTLEISG

SEQ ID NO: 1412 - protein, 277 aa, Synthetic construct
MFHYVDVGPRDGTPVLFLHGNPTSSYVWRNIIPHVAPTSRCIAPDLIGMGKSDKPDLGYFFDDHVRFMDAFIEALGLEEVVLVIHDWGSALGFHWAKRNPERVKGIAFMEFIRPIPTWDEWPEFARETFQAFRTTDVGRKLIIDQNVFIEGTLPMGVVRPLTEVEMDHYREPFLNPVDREPLWRFPNELPIAGEPANIVALVEEYMDWLHQSPVPKLLFWGTPGVLIPPAEAARLAKSLPNCKAVDIGPGLNLLQEDNPDLIGSEIARWLSTLEISG

SEQ ID NO: 1413 - protein, 277 aa, Synthetic construct
MFHYVDVGPRDGTPVLFLHGNPTSSYVWRNIIPHVAPTCRCIAPDLIGMGKSDKPDLGYFFDDHVRFMDAFIEALGLEEVVLVIHDWGSALGFHWAKRNPERVKGIAFMEFIRPIPTWDEWPEFARETFQAFRTTDVGRKLIIDQNVFIEGTLPMGVVRPLTEVEMDHYREPFLNPVDREPLWRFPNELPIAGEPANIVALVEEYMDWLHQSPVPKLLFWGTPGVLIPPAEAARLAKSLPNCKAVDIGPGLNLLQEDNPDLIGSEIARWLSTLEISG

SEQ ID NO: 1414 - protein, 277 aa, Synthetic construct
MFHYVDVGPRDGTPVLFLHGNPTSSYVWRNIIPHVAPTRRCIAPDLIGMGKSDKPDLGYFFDDHVRFMDAFIEALGLEEVVLVIHDWGSALGFHWAKRNPERVKGIAFMEFIRPIPTWDEWPEFARETFQAFRTTDVGRKLIIDQNVFIEGTLPMGVVRPLTEVEMDHYREPFLNPVDREPLWRFPNELPIAGEPANIVALVEEYMDWLHQSPVPKLLFWGTPGVLIPPAEAARLAKSLPNCKAVDIGPGLNLLQEDNPDLIGSEIARWLSTLEISG

SEQ ID NO: 1415 - protein, 277 aa, Synthetic construct
MFHYVDVGPRDGTPVLFLHGNPTSSYVWRNIIPHVAPTVRCIAPDLIGMGKSDKPDLGYFFDDHVRFMDAFIEALGLEEVVLVIHDWGSALGFHWAKRNPERVKGIAFMEFIRPIPTWDEWPEFARETFQAFRTTDVGRKLIIDQNVFIEGTLPMGVVRPLTEVEMDHYREPFLNPVDREPLWRFPNELPIAGEPANIVALVEEYMDWLHQSPVPKLLFWGTPGVLIPPAEAARLAKSLPNCKAVDIGPGLNLLQEDNPDLIGSEIARWLSTLEISG

SEQ ID NO: 1416 - protein, 277 aa, Synthetic construct
MFHYVDVGPRDGTPVLFLHGNPTSSYVWRNIIPHVAPTHHCIAPDLIGMGKSDKPDLGYFFDDHVRFMDAFIEALGLEEVVLVIHDWGSALGFHWAKRNPERVKGIAFMEFIRPIPTWDEWPEFARETFQAFRTTDVGRKLIIDQNVFIEGTLPMGVVRPLTEVEMDHYREPFLNPVDREPLWRFPNELPIAGEPANIVALVEEYMDWLHQSPVPKLLFWGTPGVLIPPAEAARLAKSLPNCKAVDIGPGLNLLQEDNPDLIGSEIARWLSTLEISG

SEQ ID NO: 1417 - protein, 277 aa, Synthetic construct
MFHYVDVGPRDGTPVLFLHGNPTSSYVWRNIIPHVAPTHYCIAPDLIGMGKSDKPDLGYFFDDHVRFMDAFIEALGLEEVVLVIHDWGSALGFHWAKRNPERVKGIAFMEFIRPIPTWDEWPEFARETFQAFRTTDVGRKLIIDQNVFIEGTLPMGVVRPLTEVEMDHYREPFLNPVDREPLWRFPNELPIAGEPANIVALVEEYMDWLHQSPVPKLLFWGTPGVLIPPAEAARLAKSLPNCKAVDIGPGLNLLQEDNPDLIGSEIARWLSTLEISG

SEQ ID NO: 1418 - protein, 277 aa, Synthetic construct
MFHYVDVGPRDGTPVLFLHGNPTSSYVWRNIIPHVAPTHQCIAPDLIGMGKSDKPDLGYFFDDHVRFMDAFIEALGLEEVVLVIHDWGSALGFHWAKRNPERVKGIAFMEFIRPIPTWDEWPEFARETFQAFRTTDVGRKLIIDQNVFIEGTLPMGVVRPLTEVEMDHYREPFLNPVDREPLWRFPNELPIAGEPANIVALVEEYMDWLHQSPVPKLLFWGTPGVLIPPAEAARLAKSLPNCKAVDIGPGLNLLQEDNPDLIGSEIARWLSTLEISG

SEQ ID NO: 1419 - protein, 277 aa, Synthetic construct
MFHYVDVGPRDGTPVLFLHGNPTSSYVWRNIIPHVAPTHWCIAPDLIGMGKSDKPDLGYFFDDHVRFMDAFIEALGLEEVVLVIHDWGSALGFHWAKRNPERVKGIAFMEFIRPIPTWDEWPEFARETFQAFRTTDVGRKLIIDQNVFIEGTLPMGVVRPLTEVEMDHYREPFLNPVDREPLWRFPNELPIAGEPANIVALVEEYMDWLHQSPVPKLLFWGTPGVLIPPAEAARLAKSLPNCKAVDIGPGLNLLQEDNPDLIGSEIARWLSTLEISG

SEQ ID NO: 1420 - protein, 277 aa, Synthetic construct
MFHYVDVGPRDGTPVLFLHGNPTSSYVWRNIIPHVAPTHKCIAPDLIGMGKSDKPDLGYFFDDHVRFMDAFIEALGLEEVVLVIHDWGSALGFHWAKRNPERVKGIAFMEFIRPIPTWDEWPEFARETFQAFRTTDVGRKLIIDQNVFIEGTLPMGVVRPLTEVEMDHYREPFLNPVDREPLWRFPNELPIAGEPANIVALVEEYMDWLHQSPVPKLLFWGTPGVLIPPAEAARLAKSLPNCKAVDIGPGLNLLQEDNPDLIGSEIARWLSTLEISG

SEQ ID NO: 1421 - protein, 277 aa, Synthetic construct
MFHYVDVGPRDGTPVLFLHGNPTSSYVWRNIIPHVAPTHLCIAPDLIGMGKSDKPDLGYFFDDHVRFMDAFIEALGLEEVVLVIHDWGSALGFHWAKRNPERVKGIAFMEFIRPIPTWDEWPEFARETFQAFRTTDVGRKLIIDQNVFIEGTLPMGVVRPLTEVEMDHYREPFLNPVDREPLWRFPNELPIAGEPANIVALVEEYMDWLHQSPVPKLLFWGTPGVLIPPAEAARLAKSLPNCKAVDIGPGLNLLQEDNPDLIGSEIARWLSTLEISG

SEQ ID NO: 1422 - protein, 277 aa, Synthetic construct
MFHYVDVGPRDGTPVLFLHGNPTSSYVWRNIIPHVAPTHRAIAPDLIGMGKSDKPDLGYFFDDHVRFMDAFIEALGLEEVVLVIHDWGSALGFHWAKRNPERVKGIAFMEFIRPIPTWDEWPEFARETFQAFRTTDVGRKLIIDQNVFIEGTLPMGVVRPLTEVEMDHYREPFLNPVDREPLWRFPNELPIAGEPANIVALVEEYMDWLHQSPVPKLLFWGTPGVLIPPAEAARLAKSLPNCKAVDIGPGLNLLQEDNPDLIGSEIARWLSTLEISG

SEQ ID NO: 1423 - protein, 277 aa, Synthetic construct
MFHYVDVGPRDGTPVLFLHGNPTSSYVWRNIIPHVAPTHRVIAPDLIGMGKSDKPDLGYFFDDHVRFMDAFIEALGLEEVVLVIHDWGSALGFHWAKRNPERVKGIAFMEFIRPIPTWDEWPEFARETFQAFRTTDVGRKLIIDQNVFIEGTLPMGVVRPLTEVEMDHYREPFLNPVDREPLWRFPNELPIAGEPANIVALVEEYMDWLHQSPVPKLLFWGTPGVLIPPAEAARLAKSLPNCKAVDIGPGLNLLQEDNPDLIGSEIARWLSTLEISG

SEQ ID NO: 1424 - protein, 277 aa, Synthetic construct
MFHYVDVGPRDGTPVLFLHGNPTSSYVWRNIIPHVAPTHRLIAPDLIGMGKSDKPDLGYFFDDHVRFMDAFIEALGLEEVVLVIHDWGSALGFHWAKRNPERVKGIAFMEFIRPIPTWDEWPEFARETFQAFRTTDVGRKLIIDQNVFIEGTLPMGVVRPLTEVEMDHYREPFLNPVDREPLWRFPNELPIAGEPANIVALVEEYMDWLHQSPVPKLLFWGTPGVLIPPAEAARLAKSLPNCKAVDIGPGLNLLQEDNPDLIGSEIARWLSTLEISG

SEQ ID NO: 1425 - protein, 277 aa, Synthetic construct
MFHYVDVGPRDGTPVLFLHGNPTSSYVWRNIIPHVAPTHRTIAPDLIGMGKSDKPDLGYFFDDHVRFMDAFIEALGLEEVVLVIHDWGSALGFHWAKRNPERVKGIAFMEFIRPIPTWDEWPEFARETFQAFRTTDVGRKLIIDQNVFIEGTLPMGVVRPLTEVEMDHYREPFLNPVDREPLWRFPNELPIAGEPANIVALVEEYMDWLHQSPVPKLLFWGTPGVLIPPAEAARLAKSLPNCKAVDIGPGLNLLQEDNPDLIGSEIARWLSTLEISG

SEQ ID NO: 1426 - protein, 277 aa, Synthetic construct
MFHYVDVGPRDGTPVLFLHGNPTSSYVWRNIIPHVAPTHRSIAPDLIGMGKSDKPDLGYFFDDHVRFMDAFIEALGLEEVVLVIHDWGSALGFHWAKRNPERVKGIAFMEFIRPIPTWDEWPEFARETFQAFRTTDVGRKLIIDQNVFIEGTLPMGVVRPLTEVEMDHYREPFLNPVDREPLWRFPNELPIAGEPANIVALVEEYMDWLHQSPVPKLLFWGTPGVLIPPAEAARLAKSLPNCKAVDIGPGLNLLQEDNPDLIGSEIARWLSTLEISG

SEQ ID NO: 1427 - protein, 277 aa, Synthetic construct
MFHYVDVGPRDGTPVLFLHGNPTSSYVWRNIIPHVAPTHRIIAPDLIGMGKSDKPDLGYFFDDHVRFMDAFIEALGLEEVVLVIHDWGSALGFHWAKRNPERVKGIAFMEFIRPIPTWDEWPEFARETFQAFRTTDVGRKLIIDQNVFIEGTLPMGVVRPLTEVEMDHYREPFLNPVDREPLWRFPNELPIAGEPANIVALVEEYMDWLHQSPVPKLLFWGTPGVLIPPAEAARLAKSLPNCKAVDIGPGLNLLQEDNPDLIGSEIARWLSTLEISG

SEQ ID NO: 1428 - protein, 277 aa, Synthetic construct
MFHYVDVGPRDGTPVLFLHGNPTSSYVWRNIIPHVAPTHRCLAPDLIGMGKSDKPDLGYFFDDHVRFMDAFIEALGLEEVVLVIHDWGSALGFHWAKRNPERVKGIAFMEFIRPIPTWDEWPEFARETFQAFRTTDVGRKLIIDQNVFIEGTLPMGVVRPLTEVEMDHYREPFLNPVDREPLWRFPNELPIAGEPANIVALVEEYMDWLHQSPVPKLLFWGTPGVLIPPAEAARLAKSLPNCKAVDIGPGLNLLQEDNPDLIGSEIARWLSTLEISG

SEQ ID NO: 1429 - protein, 277 aa, Synthetic construct
MFHYVDVGPRDGTPVLFLHGNPTSSYVWRNIIPHVAPTHRCVAPDLIGMGKSDKPDLGYFFDDHVRFMDAFIEALGLEEVVLVIHDWGSALGFHWAKRNPERVKGIAFMEFIRPIPTWDEWPEFARETFQAFRTTDVGRKLIIDQNVFIEGTLPMGVVRPLTEVEMDHYREPFLNPVDREPLWRFPNELPIAGEPANIVALVEEYMDWLHQSPVPKLLFWGTPGVLIPPAEAARLAKSLPNCKAVDIGPGLNLLQEDNPDLIGSEIARWLSTLEISG

SEQ ID NO: 1430 - protein, 277 aa, Synthetic construct
MFHYVDVGPRDGTPVLFLHGNPTSSYVWRNIIPHVAPTHRCFAPDLIGMGKSDKPDLGYFFDDHVRFMDAFIEALGLEEVVLVIHDWGSALGFHWAKRNPERVKGIAFMEFIRPIPTWDEWPEFARETFQAFRTTDVGRKLIIDQNVFIEGTLPMGVVRPLTEVEMDHYREPFLNPVDREPLWRFPNELPIAGEPANIVALVEEYMDWLHQSPVPKLLFWGTPGVLIPPAEAARLAKSLPNCKAVDIGPGLNLLQEDNPDLIGSEIARWLSTLEISG

SEQ ID NO: 1431 - protein, 277 aa, Synthetic construct
MFHYVDVGPRDGTPVLFLHGNPTSSYVWRNIIPHVAPTHRCMAPDLIGMGKSDKPDLGYFFDDHVRFMDAFIEALGLEEVVLVIHDWGSALGFHWAKRNPERVKGIAFMEFIRPIPTWDEWPEFARETFQAFRTTDVGRKLIIDQNVFIEGTLPMGVVRPLTEVEMDHYREPFLNPVDREPLWRFPNELPIAGEPANIVALVEEYMDWLHQSPVPKLLFWGTPGVLIPPAEAARLAKSLPNCKAVDIGPGLNLLQEDNPDLIGSEIARWLSTLEISG

SEQ ID NO: 1432 - protein, 277 aa, Synthetic construct
MFHYVDVGPRDGTPVLFLHGNPTSSYVWRNIIPHVAPTHRCYAPDLIGMGKSDKPDLGYFFDDHVRFMDAFIEALGLEEVVLVIHDWGSALGFHWAKRNPERVKGIAFMEFIRPIPTWDEWPEFARETFQAFRTTDVGRKLIIDQNVFIEGTLPMGVVRPLTEVEMDHYREPFLNPVDREPLWRFPNELPIAGEPANIVALVEEYMDWLHQSPVPKLLFWGTPGVLIPPAEAARLAKSLPNCKAVDIGPGLNLLQEDNPDLIGSEIARWLSTLEISG

SEQ ID NO: 1433 - protein, 277 aa, Synthetic construct
MFHYVDVGPRDGTPVLFLHGNPTSSYVWRNIIPHVAPTHRCTAPDLIGMGKSDKPDLGYFFDDHVRFMDAFIEALGLEEVVLVIHDWGSALGFHWAKRNPERVKGIAFMEFIRPIPTWDEWPEFARETFQAFRTTDVGRKLIIDQNVFIEGTLPMGVVRPLTEVEMDHYREPFLNPVDREPLWRFPNELPIAGEPANIVALVEEYMDWLHQSPVPKLLFWGTPGVLIPPAEAARLAKSLPNCKAVDIGPGLNLLQEDNPDLIGSEIARWLSTLEISG

SEQ ID NO: 1434 - protein, 277 aa, Synthetic construct
MFHYVDVGPRDGTPVLFLHGNPTSSYVWRNIIPHVAPTHRCIVPDLIGMGKSDKPDLGYFFDDHVRFMDAFIEALGLEEVVLVIHDWGSALGFHWAKRNPERVKGIAFMEFIRPIPTWDEWPEFARETFQAFRTTDVGRKLIIDQNVFIEGTLPMGVVRPLTEVEMDHYREPFLNPVDREPLWRFPNELPIAGEPANIVALVEEYMDWLHQSPVPKLLFWGTPGVLIPPAEAARLAKSLPNCKAVDIGPGLNLLQEDNPDLIGSEIARWLSTLEISG

SEQ ID NO: 1435 - protein, 277 aa, Synthetic construct
MFHYVDVGPRDGTPVLFLHGNPTSSYVWRNIIPHVAPTHRCITPDLIGMGKSDKPDLGYFFDDHVRFMDAFIEALGLEEVVLVIHDWGSALGFHWAKRNPERVKGIAFMEFIRPIPTWDEWPEFARETFQAFRTTDVGRKLIIDQNVFIEGTLPMGVVRPLTEVEMDHYREPFLNPVDREPLWRFPNELPIAGEPANIVALVEEYMDWLHQSPVPKLLFWGTPGVLIPPAEAARLAKSLPNCKAVDIGPGLNLLQEDNPDLIGSEIARWLSTLEISG

SEQ ID NO: 1436 - protein, 277 aa, Synthetic construct
MFHYVDVGPRDGTPVLFLHGNPTSSYVWRNIIPHVAPTHRCISPDLIGMGKSDKPDLGYFFDDHVRFMDAFIEALGLEEVVLVIHDWGSALGFHWAKRNPERVKGIAFMEFIRPIPTWDEWPEFARETFQAFRTTDVGRKLIIDQNVFIEGTLPMGVVRPLTEVEMDHYREPFLNPVDREPLWRFPNELPIAGEPANIVALVEEYMDWLHQSPVPKLLFWGTPGVLIPPAEAARLAKSLPNCKAVDIGPGLNLLQEDNPDLIGSEIARWLSTLEISG

SEQ ID NO: 1437 - protein, 277 aa, Synthetic construct
MFHYVDVGPRDGTPVLFLHGNPTSSYVWRNIIPHVAPTHRCIGPDLIGMGKSDKPDLGYFFDDHVRFMDAFIEALGLEEVVLVIHDWGSALGFHWAKRNPERVKGIAFMEFIRPIPTWDEWPEFARETFQAFRTTDVGRKLIIDQNVFIEGTLPMGVVRPLTEVEMDHYREPFLNPVDREPLWRFPNELPIAGEPANIVALVEEYMDWLHQSPVPKLLFWGTPGVLIPPAEAARLAKSLPNCKAVDIGPGLNLLQEDNPDLIGSEIARWLSTLEISG

SEQ ID NO: 1438 - protein, 277 aa, Synthetic construct
MFHYVDVGPRDGTPVLFLHGNPTSSYVWRNIIPHVAPTHRCICPDLIGMGKSDKPDLGYFFDDHVRFMDAFIEALGLEEVVLVIHDWGSALGFHWAKRNPERVKGIAFMEFIRPIPTWDEWPEFARETFQAFRTTDVGRKLIIDQNVFIEGTLPMGVVRPLTEVEMDHYREPFLNPVDREPLWRFPNELPIAGEPANIVALVEEYMDWLHQSPVPKLLFWGTPGVLIPPAEAARLAKSLPNCKAVDIGPGLNLLQEDNPDLIGSEIARWLSTLEISG

SEQ ID NO: 1439 - protein, 277 aa, Synthetic construct
MFHYVDVGPRDGTPVLFLHGNPTSSYVWRNIIPHVAPTHRCIIPDLIGMGKSDKPDLGYFFDDHVRFMDAFIEALGLEEVVLVIHDWGSALGFHWAKRNPERVKGIAFMEFIRPIPTWDEWPEFARETFQAFRTTDVGRKLIIDQNVFIEGTLPMGVVRPLTEVEMDHYREPFLNPVDREPLWRFPNELPIAGEPANIVALVEEYMDWLHQSPVPKLLFWGTPGVLIPPAEAARLAKSLPNCKAVDIGPGLNLLQEDNPDLIGSEIARWLSTLEISG

SEQ ID NO: 1440 - protein, 277 aa, Synthetic construct
MFHYVDVGPRDGTPVLFLHGNPTSSYVWRNIIPHVAPTHRCIAVDLIGMGKSDKPDLGYFFDDHVRFMDAFIEALGLEEVVLVIHDWGSALGFHWAKRNPERVKGIAFMEFIRPIPTWDEWPEFARETFQAFRTTDVGRKLIIDQNVFIEGTLPMGVVRPLTEVEMDHYREPFLNPVDREPLWRFPNELPIAGEPANIVALVEEYMDWLHQSPVPKLLFWGTPGVLIPPAEAARLAKSLPNCKAVDIGPGLNLLQEDNPDLIGSEIARWLSTLEISG

SEQ ID NO: 1441 - protein, 277 aa, Synthetic construct
MFHYVDVGPRDGTPVLFLHGNPTSSYVWRNIIPHVAPTHRCIALDLIGMGKSDKPDLGYFFDDHVRFMDAFIEALGLEEVVLVIHDWGSALGFHWAKRNPERVKGIAFMEFIRPIPTWDEWPEFARETFQAFRTTDVGRKLIIDQNVFIEGTLPMGVVRPLTEVEMDHYREPFLNPVDREPLWRFPNELPIAGEPANIVALVEEYMDWLHQSPVPKLLFWGTPGVLIPPAEAARLAKSLPNCKAVDIGPGLNLLQEDNPDLIGSEIARWLSTLEISG

SEQ ID NO: 1442 - protein, 277 aa, Synthetic construct
MFHYVDVGPRDGTPVLFLHGNPTSSYVWRNIIPHVAPTHRCIAADLIGMGKSDKPDLGYFFDDHVRFMDAFIEALGLEEVVLVIHDWGSALGFHWAKRNPERVKGIAFMEFIRPIPTWDEWPEFARETFQAFRTTDVGRKLIIDQNVFIEGTLPMGVVRPLTEVEMDHYREPFLNPVDREPLWRFPNELPIAGEPANIVALVEEYMDWLHQSPVPKLLFWGTPGVLIPPAEAARLAKSLPNCKAVDIGPGLNLLQEDNPDLIGSEIARWLSTLEISG

SEQ ID NO: 1443 - protein, 277 aa, Synthetic construct
MFHYVDVGPRDGTPVLFLHGNPTSSYVWRNIIPHVAPTHRCIAIDLIGMGKSDKPDLGYFFDDHVRFMDAFIEALGLEEVVLVIHDWGSALGFHWAKRNPERVKGIAFMEFIRPIPTWDEWPEFARETFQAFRTTDVGRKLIIDQNVFIEGTLPMGVVRPLTEVEMDHYREPFLNPVDREPLWRFPNELPIAGEPANIVALVEEYMDWLHQSPVPKLLFWGTPGVLIPPAEAARLAKSLPNCKAVDIGPGLNLLQEDNPDLIGSEIARWLSTLEISG

SEQ ID NO: 1444 - protein, 277 aa, Synthetic construct
MFHYVDVGPRDGTPVLFLHGNPTSSYVWRNIIPHVAPTHRCIACDLIGMGKSDKPDLGYFFDDHVRFMDAFIEALGLEEVVLVIHDWGSALGFHWAKRNPERVKGIAFMEFIRPIPTWDEWPEFARETFQAFRTTDVGRKLIIDQNVFIEGTLPMGVVRPLTEVEMDHYREPFLNPVDREPLWRFPNELPIAGEPANIVALVEEYMDWLHQSPVPKLLFWGTPGVLIPPAEAARLAKSLPNCKAVDIGPGLNLLQEDNPDLIGSEIARWLSTLEISG

SEQ ID NO: 1445 - protein, 277 aa, Synthetic construct
MFHYVDVGPRDGTPVLFLHGNPTSSYVWRNIIPHVAPTHRCIAMDLIGMGKSDKPDLGYFFDDHVRFMDAFIEALGLEEVVLVIHDWGSALGFHWAKRNPERVKGIAFMEFIRPIPTWDEWPEFARETFQAFRTTDVGRKLIIDQNVFIEGTLPMGVVRPLTEVEMDHYREPFLNPVDREPLWRFPNELPIAGEPANIVALVEEYMDWLHQSPVPKLLFWGTPGVLIPPAEAARLAKSLPNCKAVDIGPGLNLLQEDNPDLIGSEIARWLSTLEISG

SEQ ID NO: 1446 - protein, 277 aa, Synthetic construct
MFHYVDVGPRDGTPVLFLHGNPTSSYVWRNIIPHVAPTHRCIAPELIGMGKSDKPDLGYFFDDHVRFMDAFIEALGLEEVVLVIHDWGSALGFHWAKRNPERVKGIAFMEFIRPIPTWDEWPEFARETFQAFRTTDVGRKLIIDQNVFIEGTLPMGVVRPLTEVEMDHYREPFLNPVDREPLWRFPNELPIAGEPANIVALVEEYMDWLHQSPVPKLLFWGTPGVLIPPAEAARLAKSLPNCKAVDIGPGLNLLQEDNPDLIGSEIARWLSTLEISG

SEQ ID NO: 1447 - protein, 277 aa, Synthetic construct
MFHYVDVGPRDGTPVLFLHGNPTSSYVWRNIIPHVAPTHRCIAPNLIGMGKSDKPDLGYFFDDHVRFMDAFIEALGLEEVVLVIHDWGSALGFHWAKRNPERVKGIAFMEFIRPIPTWDEWPEFARETFQAFRTTDVGRKLIIDQNVFIEGTLPMGVVRPLTEVEMDHYREPFLNPVDREPLWRFPNELPIAGEPANIVALVEEYMDWLHQSPVPKLLFWGTPGVLIPPAEAARLAKSLPNCKAVDIGPGLNLLQEDNPDLIGSEIARWLSTLEISG

SEQ ID NO: 1448 - protein, 277 aa, Synthetic construct
MFHYVDVGPRDGTPVLFLHGNPTSSYVWRNIIPHVAPTHRCIAPGLIGMGKSDKPDLGYFFDDHVRFMDAFIEALGLEEVVLVIHDWGSALGFHWAKRNPERVKGIAFMEFIRPIPTWDEWPEFARETFQAFRTTDVGRKLIIDQNVFIEGTLPMGVVRPLTEVEMDHYREPFLNPVDREPLWRFPNELPIAGEPANIVALVEEYMDWLHQSPVPKLLFWGTPGVLIPPAEAARLAKSLPNCKAVDIGPGLNLLQEDNPDLIGSEIARWLSTLEISG

SEQ ID NO: 1449 - protein, 277 aa, Synthetic construct
MFHYVDVGPRDGTPVLFLHGNPTSSYVWRNIIPHVAPTHRCIAPTLIGMGKSDKPDLGYFFDDHVRFMDAFIEALGLEEVVLVIHDWGSALGFHWAKRNPERVKGIAFMEFIRPIPTWDEWPEFARETFQAFRTTDVGRKLIIDQNVFIEGTLPMGVVRPLTEVEMDHYREPFLNPVDREPLWRFPNELPIAGEPANIVALVEEYMDWLHQSPVPKLLFWGTPGVLIPPAEAARLAKSLPNCKAVDIGPGLNLLQEDNPDLIGSEIARWLSTLEISG

SEQ ID NO: 1450 - protein, 277 aa, Synthetic construct
MFHYVDVGPRDGTPVLFLHGNPTSSYVWRNIIPHVAPTHRCIAPSLIGMGKSDKPDLGYFFDDHVRFMDAFIEALGLEEVVLVIHDWGSALGFHWAKRNPERVKGIAFMEFIRPIPTWDEWPEFARETFQAFRTTDVGRKLIIDQNVFIEGTLPMGVVRPLTEVEMDHYREPFLNPVDREPLWRFPNELPIAGEPANIVALVEEYMDWLHQSPVPKLLFWGTPGVLIPPAEAARLAKSLPNCKAVDIGPGLNLLQEDNPDLIGSEIARWLSTLEISG

SEQ ID NO: 1451 - protein, 277 aa, Synthetic construct
MFHYVDVGPRDGTPVLFLHGNPTSSYVWRNIIPHVAPTHRCIAPALIGMGKSDKPDLGYFFDDHVRFMDAFIEALGLEEVVLVIHDWGSALGFHWAKRNPERVKGIAFMEFIRPIPTWDEWPEFARETFQAFRTTDVGRKLIIDQNVFIEGTLPMGVVRPLTEVEMDHYREPFLNPVDREPLWRFPNELPIAGEPANIVALVEEYMDWLHQSPVPKLLFWGTPGVLIPPAEAARLAKSLPNCKAVDIGPGLNLLQEDNPDLIGSEIARWLSTLEISG

SEQ ID NO: 1452 - protein, 277 aa, Synthetic construct
MFHYVDVGPRDGTPVLFLHGNPTSSYVWRNIIPHVAPTHRCIAPDMIGMGKSDKPDLGYFFDDHVRFMDAFIEALGLEEVVLVIHDWGSALGFHWAKRNPERVKGIAFMEFIRPIPTWDEWPEFARETFQAFRTTDVGRKLIIDQNVFIEGTLPMGVVRPLTEVEMDHYREPFLNPVDREPLWRFPNELPIAGEPANIVALVEEYMDWLHQSPVPKLLFWGTPGVLIPPAEAARLAKSLPNCKAVDIGPGLNLLQEDNPDLIGSEIARWLSTLEISG

SEQ ID NO: 1453 - protein, 277 aa, Synthetic construct
MFHYVDVGPRDGTPVLFLHGNPTSSYVWRNIIPHVAPTHRCIAPDHIGMGKSDKPDLGYFFDDHVRFMDAFIEALGLEEVVLVIHDWGSALGFHWAKRNPERVKGIAFMEFIRPIPTWDEWPEFARETFQAFRTTDVGRKLIIDQNVFIEGTLPMGVVRPLTEVEMDHYREPFLNPVDREPLWRFPNELPIAGEPANIVALVEEYMDWLHQSPVPKLLFWGTPGVLIPPAEAARLAKSLPNCKAVDIGPGLNLLQEDNPDLIGSEIARWLSTLEISG

SEQ ID NO: 1454 - protein, 277 aa, Synthetic construct
MFHYVDVGPRDGTPVLFLHGNPTSSYVWRNIIPHVAPTHRCIAPDFIGMGKSDKPDLGYFFDDHVRFMDAFIEALGLEEVVLVIHDWGSALGFHWAKRNPERVKGIAFMEFIRPIPTWDEWPEFARETFQAFRTTDVGRKLIIDQNVFIEGTLPMGVVRPLTEVEMDHYREPFLNPVDREPLWRFPNELPIAGEPANIVALVEEYMDWLHQSPVPKLLFWGTPGVLIPPAEAARLAKSLPNCKAVDIGPGLNLLQEDNPDLIGSEIARWLSTLEISG

SEQ ID NO: 1455 - protein, 277 aa, Synthetic construct
MFHYVDVGPRDGTPVLFLHGNPTSSYVWRNIIPHVAPTHRCIAPDQIGMGKSDKPDLGYFFDDHVRFMDAFIEALGLEEVVLVIHDWGSALGFHWAKRNPERVKGIAFMEFIRPIPTWDEWPEFARETFQAFRTTDVGRKLIIDQNVFIEGTLPMGVVRPLTEVEMDHYREPFLNPVDREPLWRFPNELPIAGEPANIVALVEEYMDWLHQSPVPKLLFWGTPGVLIPPAEAARLAKSLPNCKAVDIGPGLNLLQEDNPDLIGSEIARWLSTLEISG

SEQ ID NO: 1456 - protein, 277 aa, Synthetic construct
MFHYVDVGPRDGTPVLFLHGNPTSSYVWRNIIPHVAPTHRCIAPDIIGMGKSDKPDLGYFFDDHVRFMDAFIEALGLEEVVLVIHDWGSALGFHWAKRNPERVKGIAFMEFIRPIPTWDEWPEFARETFQAFRTTDVGRKLIIDQNVFIEGTLPMGVVRPLTEVEMDHYREPFLNPVDREPLWRFPNELPIAGEPANIVALVEEYMDWLHQSPVPKLLFWGTPGVLIPPAEAARLAKSLPNCKAVDIGPGLNLLQEDNPDLIGSEIARWLSTLEISG

SEQ ID NO: 1457 - protein, 277 aa, Synthetic construct
MFHYVDVGPRDGTPVLFLHGNPTSSYVWRNIIPHVAPTHRCIAPDYIGMGKSDKPDLGYFFDDHVRFMDAFIEALGLEEVVLVIHDWGSALGFHWAKRNPERVKGIAFMEFIRPIPTWDEWPEFARETFQAFRTTDVGRKLIIDQNVFIEGTLPMGVVRPLTEVEMDHYREPFLNPVDREPLWRFPNELPIAGEPANIVALVEEYMDWLHQSPVPKLLFWGTPGVLIPPAEAARLAKSLPNCKAVDIGPGLNLLQEDNPDLIGSEIARWLSTLEISG

SEQ ID NO: 1458 - protein, 277 aa, Synthetic construct
MFHYVDVGPRDGTPVLFLHGNPTSSYVWRNIIPHVAPTHRCIAPDLVGMGKSDKPDLGYFFDDHVRFMDAFIEALGLEEVVLVIHDWGSALGFHWAKRNPERVKGIAFMEFIRPIPTWDEWPEFARETFQAFRTTDVGRKLIIDQNVFIEGTLPMGVVRPLTEVEMDHYREPFLNPVDREPLWRFPNELPIAGEPANIVALVEEYMDWLHQSPVPKLLFWGTPGVLIPPAEAARLAKSLPNCKAVDIGPGLNLLQEDNPDLIGSEIARWLSTLEISG

SEQ ID NO: 1459 - protein, 277 aa, Synthetic construct
MFHYVDVGPRDGTPVLFLHGNPTSSYVWRNIIPHVAPTHRCIAPDLLGMGKSDKPDLGYFFDDHVRFMDAFIEALGLEEVVLVIHDWGSALGFHWAKRNPERVKGIAFMEFIRPIPTWDEWPEFARETFQAFRTTDVGRKLIIDQNVFIEGTLPMGVVRPLTEVEMDHYREPFLNPVDREPLWRFPNELPIAGEPANIVALVEEYMDWLHQSPVPKLLFWGTPGVLIPPAEAARLAKSLPNCKAVDIGPGLNLLQEDNPDLIGSEIARWLSTLEISG

SEQ ID NO: 1460 - protein, 277 aa, Synthetic construct
MFHYVDVGPRDGTPVLFLHGNPTSSYVWRNIIPHVAPTHRCIAPDLMGMGKSDKPDLGYFFDDHVRFMDAFIEALGLEEVVLVIHDWGSALGFHWAKRNPERVKGIAFMEFIRPIPTWDEWPEFARETFQAFRTTDVGRKLIIDQNVFIEGTLPMGVVRPLTEVEMDHYREPFLNPVDREPLWRFPNELPIAGEPANIVALVEEYMDWLHQSPVPKLLFWGTPGVLIPPAEAARLAKSLPNCKAVDIGPGLNLLQEDNPDLIGSEIARWLSTLEISG

SEQ ID NO: 1461 - protein, 277 aa, Synthetic construct
MFHYVDVGPRDGTPVLFLHGNPTSSYVWRNIIPHVAPTHRCIAPDLAGMGKSDKPDLGYFFDDHVRFMDAFIEALGLEEVVLVIHDWGSALGFHWAKRNPERVKGIAFMEFIRPIPTWDEWPEFARETFQAFRTTDVGRKLIIDQNVFIEGTLPMGVVRPLTEVEMDHYREPFLNPVDREPLWRFPNELPIAGEPANIVALVEEYMDWLHQSPVPKLLFWGTPGVLIPPAEAARLAKSLPNCKAVDIGPGLNLLQEDNPDLIGSEIARWLSTLEISG

SEQ ID NO: 1462 - protein, 277 aa, Synthetic construct
MFHYVDVGPRDGTPVLFLHGNPTSSYVWRNIIPHVAPTHRCIAPDLPGMGKSDKPDLGYFFDDHVRFMDAFIEALGLEEVVLVIHDWGSALGFHWAKRNPERVKGIAFMEFIRPIPTWDEWPEFARETFQAFRTTDVGRKLIIDQNVFIEGTLPMGVVRPLTEVEMDHYREPFLNPVDREPLWRFPNELPIAGEPANIVALVEEYMDWLHQSPVPKLLFWGTPGVLIPPAEAARLAKSLPNCKAVDIGPGLNLLQEDNPDLIGSEIARWLSTLEISG

SEQ ID NO: 1463 - protein, 277 aa, Synthetic construct
MFHYVDVGPRDGTPVLFLHGNPTSSYVWRNIIPHVAPTHRCIAPDLFGMGKSDKPDLGYFFDDHVRFMDAFIEALGLEEVVLVIHDWGSALGFHWAKRNPERVKGIAFMEFIRPIPTWDEWPEFARETFQAFRTTDVGRKLIIDQNVFIEGTLPMGVVRPLTEVEMDHYREPFLNPVDREPLWRFPNELPIAGEPANIVALVEEYMDWLHQSPVPKLLFWGTPGVLIPPAEAARLAKSLPNCKAVDIGPGLNLLQEDNPDLIGSEIARWLSTLEISG

SEQ ID NO: 1464 - protein, 277 aa, Synthetic construct
MFHYVDVGPRDGTPVLFLHGNPTSSYVWRNIIPHVAPTHRCIAPDLIAMGKSDKPDLGYFFDDHVRFMDAFIEALGLEEVVLVIHDWGSALGFHWAKRNPERVKGIAFMEFIRPIPTWDEWPEFARETFQAFRTTDVGRKLIIDQNVFIEGTLPMGVVRPLTEVEMDHYREPFLNPVDREPLWRFPNELPIAGEPANIVALVEEYMDWLHQSPVPKLLFWGTPGVLIPPAEAARLAKSLPNCKAVDIGPGLNLLQEDNPDLIGSEIARWLSTLEISG

SEQ ID NO: 1465 - protein, 277 aa, Synthetic construct
MFHYVDVGPRDGTPVLFLHGNPTSSYVWRNIIPHVAPTHRCIAPDLISMGKSDKPDLGYFFDDHVRFMDAFIEALGLEEVVLVIHDWGSALGFHWAKRNPERVKGIAFMEFIRPIPTWDEWPEFARETFQAFRTTDVGRKLIIDQNVFIEGTLPMGVVRPLTEVEMDHYREPFLNPVDREPLWRFPNELPIAGEPANIVALVEEYMDWLHQSPVPKLLFWGTPGVLIPPAEAARLAKSLPNCKAVDIGPGLNLLQEDNPDLIGSEIARWLSTLEISG

SEQ ID NO: 1466 - protein, 277 aa, Synthetic construct
MFHYVDVGPRDGTPVLFLHGNPTSSYVWRNIIPHVAPTHRCIAPDLINMGKSDKPDLGYFFDDHVRFMDAFIEALGLEEVVLVIHDWGSALGFHWAKRNPERVKGIAFMEFIRPIPTWDEWPEFARETFQAFRTTDVGRKLIIDQNVFIEGTLPMGVVRPLTEVEMDHYREPFLNPVDREPLWRFPNELPIAGEPANIVALVEEYMDWLHQSPVPKLLFWGTPGVLIPPAEAARLAKSLPNCKAVDIGPGLNLLQEDNPDLIGSEIARWLSTLEISG

SEQ ID NO: 1467 - protein, 277 aa, Synthetic construct
MFHYVDVGPRDGTPVLFLHGNPTSSYVWRNIIPHVAPTHRCIAPDLIDMGKSDKPDLGYFFDDHVRFMDAFIEALGLEEVVLVIHDWGSALGFHWAKRNPERVKGIAFMEFIRPIPTWDEWPEFARETFQAFRTTDVGRKLIIDQNVFIEGTLPMGVVRPLTEVEMDHYREPFLNPVDREPLWRFPNELPIAGEPANIVALVEEYMDWLHQSPVPKLLFWGTPGVLIPPAEAARLAKSLPNCKAVDIGPGLNLLQEDNPDLIGSEIARWLSTLEISG

SEQ ID NO: 1468 - protein, 277 aa, Synthetic construct
MFHYVDVGPRDGTPVLFLHGNPTSSYVWRNIIPHVAPTHRCIAPDLICMGKSDKPDLGYFFDDHVRFMDAFIEALGLEEVVLVIHDWGSALGFHWAKRNPERVKGIAFMEFIRPIPTWDEWPEFARETFQAFRTTDVGRKLIIDQNVFIEGTLPMGVVRPLTEVEMDHYREPFLNPVDREPLWRFPNELPIAGEPANIVALVEEYMDWLHQSPVPKLLFWGTPGVLIPPAEAARLAKSLPNCKAVDIGPGLNLLQEDNPDLIGSEIARWLSTLEISG

SEQ ID NO: 1469 - protein, 277 aa, Synthetic construct
MFHYVDVGPRDGTPVLFLHGNPTSSYVWRNIIPHVAPTHRCIAPDLIEMGKSDKPDLGYFFDDHVRFMDAFIEALGLEEVVLVIHDWGSALGFHWAKRNPERVKGIAFMEFIRPIPTWDEWPEFARETFQAFRTTDVGRKLIIDQNVFIEGTLPMGVVRPLTEVEMDHYREPFLNPVDREPLWRFPNELPIAGEPANIVALVEEYMDWLHQSPVPKLLFWGTPGVLIPPAEAARLAKSLPNCKAVDIGPGLNLLQEDNPDLIGSEIARWLSTLEISG

SEQ ID NO: 1470 - protein, 277 aa, Synthetic construct
MFHYVDVGPRDGTPVLFLHGNPTSSYVWRNIIPHVAPTHRCIAPDLIGFGKSDKPDLGYFFDDHVRFMDAFIEALGLEEVVLVIHDWGSALGFHWAKRNPERVKGIAFMEFIRPIPTWDEWPEFARETFQAFRTTDVGRKLIIDQNVFIEGTLPMGVVRPLTEVEMDHYREPFLNPVDREPLWRFPNELPIAGEPANIVALVEEYMDWLHQSPVPKLLFWGTPGVLIPPAEAARLAKSLPNCKAVDIGPGLNLLQEDNPDLIGSEIARWLSTLEISG

SEQ ID NO: 1471 - protein, 277 aa, Synthetic construct
MFHYVDVGPRDGTPVLFLHGNPTSSYVWRNIIPHVAPTHRCIAPDLIGYGKSDKPDLGYFFDDHVRFMDAFIEALGLEEVVLVIHDWGSALGFHWAKRNPERVKGIAFMEFIRPIPTWDEWPEFARETFQAFRTTDVGRKLIIDQNVFIEGTLPMGVVRPLTEVEMDHYREPFLNPVDREPLWRFPNELPIAGEPANIVALVEEYMDWLHQSPVPKLLFWGTPGVLIPPAEAARLAKSLPNCKAVDIGPGLNLLQEDNPDLIGSEIARWLSTLEISG

SEQ ID NO: 1472 - protein, 277 aa, Synthetic construct
MFHYVDVGPRDGTPVLFLHGNPTSSYVWRNIIPHVAPTHRCIAPDLIGLGKSDKPDLGYFFDDHVRFMDAFIEALGLEEVVLVIHDWGSALGFHWAKRNPERVKGIAFMEFIRPIPTWDEWPEFARETFQAFRTTDVGRKLIIDQNVFIEGTLPMGVVRPLTEVEMDHYREPFLNPVDREPLWRFPNELPIAGEPANIVALVEEYMDWLHQSPVPKLLFWGTPGVLIPPAEAARLAKSLPNCKAVDIGPGLNLLQEDNPDLIGSEIARWLSTLEISG

SEQ ID NO: 1473 - protein, 277 aa, Synthetic construct
MFHYVDVGPRDGTPVLFLHGNPTSSYVWRNIIPHVAPTHRCIAPDLIGCGKSDKPDLGYFFDDHVRFMDAFIEALGLEEVVLVIHDWGSALGFHWAKRNPERVKGIAFMEFIRPIPTWDEWPEFARETFQAFRTTDVGRKLIIDQNVFIEGTLPMGVVRPLTEVEMDHYREPFLNPVDREPLWRFPNELPIAGEPANIVALVEEYMDWLHQSPVPKLLFWGTPGVLIPPAEAARLAKSLPNCKAVDIGPGLNLLQEDNPDLIGSEIARWLSTLEISG

SEQ ID NO: 1474 - protein, 277 aa, Synthetic construct
MFHYVDVGPRDGTPVLFLHGNPTSSYVWRNIIPHVAPTHRCIAPDLIGAGKSDKPDLGYFFDDHVRFMDAFIEALGLEEVVLVIHDWGSALGFHWAKRNPERVKGIAFMEFIRPIPTWDEWPEFARETFQAFRTTDVGRKLIIDQNVFIEGTLPMGVVRPLTEVEMDHYREPFLNPVDREPLWRFPNELPIAGEPANIVALVEEYMDWLHQSPVPKLLFWGTPGVLIPPAEAARLAKSLPNCKAVDIGPGLNLLQEDNPDLIGSEIARWLSTLEISG

SEQ ID NO: 1475 - protein, 277 aa, Synthetic construct
MFHYVDVGPRDGTPVLFLHGNPTSSYVWRNIIPHVAPTHRCIAPDLIGQGKSDKPDLGYFFDDHVRFMDAFIEALGLEEVVLVIHDWGSALGFHWAKRNPERVKGIAFMEFIRPIPTWDEWPEFARETFQAFRTTDVGRKLIIDQNVFIEGTLPMGVVRPLTEVEMDHYREPFLNPVDREPLWRFPNELPIAGEPANIVALVEEYMDWLHQSPVPKLLFWGTPGVLIPPAEAARLAKSLPNCKAVDIGPGLNLLQEDNPDLIGSEIARWLSTLEISG

SEQ ID NO: 1476 - protein, 277 aa, Synthetic construct
MFHYVDVGPRDGTPVLFLHGNPTSSYVWRNIIPHVAPTHRCIAPDLIGMAKSDKPDLGYFFDDHVRFMDAFIEALGLEEVVLVIHDWGSALGFHWAKRNPERVKGIAFMEFIRPIPTWDEWPEFARETFQAFRTTDVGRKLIIDQNVFIEGTLPMGVVRPLTEVEMDHYREPFLNPVDREPLWRFPNELPIAGEPANIVALVEEYMDWLHQSPVPKLLFWGTPGVLIPPAEAARLAKSLPNCKAVDIGPGLNLLQEDNPDLIGSEIARWLSTLEISG

SEQ ID NO: 1477 - protein, 277 aa, Synthetic construct
MFHYVDVGPRDGTPVLFLHGNPTSSYVWRNIIPHVAPTHRCIAPDLIGMSKSDKPDLGYFFDDHVRFMDAFIEALGLEEVVLVIHDWGSALGFHWAKRNPERVKGIAFMEFIRPIPTWDEWPEFARETFQAFRTTDVGRKLIIDQNVFIEGTLPMGVVRPLTEVEMDHYREPFLNPVDREPLWRFPNELPIAGEPANIVALVEEYMDWLHQSPVPKLLFWGTPGVLIPPAEAARLAKSLPNCKAVDIGPGLNLLQEDNPDLIGSEIARWLSTLEISG

SEQ ID NO: 1478 - protein, 277 aa, Synthetic construct
MFHYVDVGPRDGTPVLFLHGNPTSSYVWRNIIPHVAPTHRCIAPDLIGMNKSDKPDLGYFFDDHVRFMDAFIEALGLEEVVLVIHDWGSALGFHWAKRNPERVKGIAFMEFIRPIPTWDEWPEFARETFQAFRTTDVGRKLIIDQNVFIEGTLPMGVVRPLTEVEMDHYREPFLNPVDREPLWRFPNELPIAGEPANIVALVEEYMDWLHQSPVPKLLFWGTPGVLIPPAEAARLAKSLPNCKAVDIGPGLNLLQEDNPDLIGSEIARWLSTLEISG

SEQ ID NO: 1479 - protein, 277 aa, Synthetic construct
MFHYVDVGPRDGTPVLFLHGNPTSSYVWRNIIPHVAPTHRCIAPDLIGMDKSDKPDLGYFFDDHVRFMDAFIEALGLEEVVLVIHDWGSALGFHWAKRNPERVKGIAFMEFIRPIPTWDEWPEFARETFQAFRTTDVGRKLIIDQNVFIEGTLPMGVVRPLTEVEMDHYREPFLNPVDREPLWRFPNELPIAGEPANIVALVEEYMDWLHQSPVPKLLFWGTPGVLIPPAEAARLAKSLPNCKAVDIGPGLNLLQEDNPDLIGSEIARWLSTLEISG

SEQ ID NO: 1480 - protein, 277 aa, Synthetic construct
MFHYVDVGPRDGTPVLFLHGNPTSSYVWRNIIPHVAPTHRCIAPDLIGMEKSDKPDLGYFFDDHVRFMDAFIEALGLEEVVLVIHDWGSALGFHWAKRNPERVKGIAFMEFIRPIPTWDEWPEFARETFQAFRTTDVGRKLIIDQNVFIEGTLPMGVVRPLTEVEMDHYREPFLNPVDREPLWRFPNELPIAGEPANIVALVEEYMDWLHQSPVPKLLFWGTPGVLIPPAEAARLAKSLPNCKAVDIGPGLNLLQEDNPDLIGSEIARWLSTLEISG

SEQ ID NO: 1481 - protein, 277 aa, Synthetic construct
MFHYVDVGPRDGTPVLFLHGNPTSSYVWRNIIPHVAPTHRCIAPDLIGMRKSDKPDLGYFFDDHVRFMDAFIEALGLEEVVLVIHDWGSALGFHWAKRNPERVKGIAFMEFIRPIPTWDEWPEFARETFQAFRTTDVGRKLIIDQNVFIEGTLPMGVVRPLTEVEMDHYREPFLNPVDREPLWRFPNELPIAGEPANIVALVEEYMDWLHQSPVPKLLFWGTPGVLIPPAEAARLAKSLPNCKAVDIGPGLNLLQEDNPDLIGSEIARWLSTLEISG

SEQ ID NO: 1482 - protein, 277 aa, Synthetic construct
MFHYVDVGPRDGTPVLFLHGNPTSSYVWRNIIPHVAPTHRCIAPDLIGMGRSDKPDLGYFFDDHVRFMDAFIEALGLEEVVLVIHDWGSALGFHWAKRNPERVKGIAFMEFIRPIPTWDEWPEFARETFQAFRTTDVGRKLIIDQNVFIEGTLPMGVVRPLTEVEMDHYREPFLNPVDREPLWRFPNELPIAGEPANIVALVEEYMDWLHQSPVPKLLFWGTPGVLIPPAEAARLAKSLPNCKAVDIGPGLNLLQEDNPDLIGSEIARWLSTLEISG

SEQ ID NO: 1483 - protein, 277 aa, Synthetic construct
MFHYVDVGPRDGTPVLFLHGNPTSSYVWRNIIPHVAPTHRCIAPDLIGMGQSDKPDLGYFFDDHVRFMDAFIEALGLEEVVLVIHDWGSALGFHWAKRNPERVKGIAFMEFIRPIPTWDEWPEFARETFQAFRTTDVGRKLIIDQNVFIEGTLPMGVVRPLTEVEMDHYREPFLNPVDREPLWRFPNELPIAGEPANIVALVEEYMDWLHQSPVPKLLFWGTPGVLIPPAEAARLAKSLPNCKAVDIGPGLNLLQEDNPDLIGSEIARWLSTLEISG

SEQ ID NO: 1484 - protein, 277 aa, Synthetic construct
MFHYVDVGPRDGTPVLFLHGNPTSSYVWRNIIPHVAPTHRCIAPDLIGMGDSDKPDLGYFFDDHVRFMDAFIEALGLEEVVLVIHDWGSALGFHWAKRNPERVKGIAFMEFIRPIPTWDEWPEFARETFQAFRTTDVGRKLIIDQNVFIEGTLPMGVVRPLTEVEMDHYREPFLNPVDREPLWRFPNELPIAGEPANIVALVEEYMDWLHQSPVPKLLFWGTPGVLIPPAEAARLAKSLPNCKAVDIGPGLNLLQEDNPDLIGSEIARWLSTLEISG

SEQ ID NO: 1485 - protein, 277 aa, Synthetic construct
MFHYVDVGPRDGTPVLFLHGNPTSSYVWRNIIPHVAPTHRCIAPDLIGMGESDKPDLGYFFDDHVRFMDAFIEALGLEEVVLVIHDWGSALGFHWAKRNPERVKGIAFMEFIRPIPTWDEWPEFARETFQAFRTTDVGRKLIIDQNVFIEGTLPMGVVRPLTEVEMDHYREPFLNPVDREPLWRFPNELPIAGEPANIVALVEEYMDWLHQSPVPKLLFWGTPGVLIPPAEAARLAKSLPNCKAVDIGPGLNLLQEDNPDLIGSEIARWLSTLEISG

SEQ ID NO: 1486 - protein, 277 aa, Synthetic construct
MFHYVDVGPRDGTPVLFLHGNPTSSYVWRNIIPHVAPTHRCIAPDLIGMGASDKPDLGYFFDDHVRFMDAFIEALGLEEVVLVIHDWGSALGFHWAKRNPERVKGIAFMEFIRPIPTWDEWPEFARETFQAFRTTDVGRKLIIDQNVFIEGTLPMGVVRPLTEVEMDHYREPFLNPVDREPLWRFPNELPIAGEPANIVALVEEYMDWLHQSPVPKLLFWGTPGVLIPPAEAARLAKSLPNCKAVDIGPGLNLLQEDNPDLIGSEIARWLSTLEISG

SEQ ID NO: 1487 - protein, 277 aa, Synthetic construct
MFHYVDVGPRDGTPVLFLHGNPTSSYVWRNIIPHVAPTHRCIAPDLIGMGLSDKPDLGYFFDDHVRFMDAFIEALGLEEVVLVIHDWGSALGFHWAKRNPERVKGIAFMEFIRPIPTWDEWPEFARETFQAFRTTDVGRKLIIDQNVFIEGTLPMGVVRPLTEVEMDHYREPFLNPVDREPLWRFPNELPIAGEPANIVALVEEYMDWLHQSPVPKLLFWGTPGVLIPPAEAARLAKSLPNCKAVDIGPGLNLLQEDNPDLIGSEIARWLSTLEISG

SEQ ID NO: 1488 - protein, 277 aa, Synthetic construct
MFHYVDVGPRDGTPVLFLHGNPTSSYVWRNIIPHVAPTHRCIAPDLIGMGKTDKPDLGYFFDDHVRFMDAFIEALGLEEVVLVIHDWGSALGFHWAKRNPERVKGIAFMEFIRPIPTWDEWPEFARETFQAFRTTDVGRKLIIDQNVFIEGTLPMGVVRPLTEVEMDHYREPFLNPVDREPLWRFPNELPIAGEPANIVALVEEYMDWLHQSPVPKLLFWGTPGVLIPPAEAARLAKSLPNCKAVDIGPGLNLLQEDNPDLIGSEIARWLSTLEISG

SEQ ID NO: 1489 - protein, 277 aa, Synthetic construct
MFHYVDVGPRDGTPVLFLHGNPTSSYVWRNIIPHVAPTHRCIAPDLIGMGKADKPDLGYFFDDHVRFMDAFIEALGLEEVVLVIHDWGSALGFHWAKRNPERVKGIAFMEFIRPIPTWDEWPEFARETFQAFRTTDVGRKLIIDQNVFIEGTLPMGVVRPLTEVEMDHYREPFLNPVDREPLWRFPNELPIAGEPANIVALVEEYMDWLHQSPVPKLLFWGTPGVLIPPAEAARLAKSLPNCKAVDIGPGLNLLQEDNPDLIGSEIARWLSTLEISG

SEQ ID NO: 1490 - protein, 277 aa, Synthetic construct
MFHYVDVGPRDGTPVLFLHGNPTSSYVWRNIIPHVAPTHRCIAPDLIGMGKGDKPDLGYFFDDHVRFMDAFIEALGLEEVVLVIHDWGSALGFHWAKRNPERVKGIAFMEFIRPIPTWDEWPEFARETFQAFRTTDVGRKLIIDQNVFIEGTLPMGVVRPLTEVEMDHYREPFLNPVDREPLWRFPNELPIAGEPANIVALVEEYMDWLHQSPVPKLLFWGTPGVLIPPAEAARLAKSLPNCKAVDIGPGLNLLQEDNPDLIGSEIARWLSTLEISG

SEQ ID NO: 1491 - protein, 277 aa, Synthetic construct
MFHYVDVGPRDGTPVLFLHGNPTSSYVWRNIIPHVAPTHRCIAPDLIGMGKNDKPDLGYFFDDHVRFMDAFIEALGLEEVVLVIHDWGSALGFHWAKRNPERVKGIAFMEFIRPIPTWDEWPEFARETFQAFRTTDVGRKLIIDQNVFIEGTLPMGVVRPLTEVEMDHYREPFLNPVDREPLWRFPNELPIAGEPANIVALVEEYMDWLHQSPVPKLLFWGTPGVLIPPAEAARLAKSLPNCKAVDIGPGLNLLQEDNPDLIGSEIARWLSTLEISG

SEQ ID NO: 1492 - protein, 277 aa, Synthetic construct
MFHYVDVGPRDGTPVLFLHGNPTSSYVWRNIIPHVAPTHRCIAPDLIGMGKCDKPDLGYFFDDHVRFMDAFIEALGLEEVVLVIHDWGSALGFHWAKRNPERVKGIAFMEFIRPIPTWDEWPEFARETFQAFRTTDVGRKLIIDQNVFIEGTLPMGVVRPLTEVEMDHYREPFLNPVDREPLWRFPNELPIAGEPANIVALVEEYMDWLHQSPVPKLLFWGTPGVLIPPAEAARLAKSLPNCKAVDIGPGLNLLQEDNPDLIGSEIARWLSTLEISG

SEQ ID NO: 1493 - protein, 277 aa, Synthetic construct
MFHYVDVGPRDGTPVLFLHGNPTSSYVWRNIIPHVAPTHRCIAPDLIGMGKPDKPDLGYFFDDHVRFMDAFIEALGLEEVVLVIHDWGSALGFHWAKRNPERVKGIAFMEFIRPIPTWDEWPEFARETFQAFRTTDVGRKLIIDQNVFIEGTLPMGVVRPLTEVEMDHYREPFLNPVDREPLWRFPNELPIAGEPANIVALVEEYMDWLHQSPVPKLLFWGTPGVLIPPAEAARLAKSLPNCKAVDIGPGLNLLQEDNPDLIGSEIARWLSTLEISG

SEQ ID NO: 1494 - protein, 277 aa, Synthetic construct
MFHYVDVGPRDGTPVLFLHGNPTSSYVWRNIIPHVAPTHRCIAPDLIGMGKSGKPDLGYFFDDHVRFMDAFIEALGLEEVVLVIHDWGSALGFHWAKRNPERVKGIAFMEFIRPIPTWDEWPEFARETFQAFRTTDVGRKLIIDQNVFIEGTLPMGVVRPLTEVEMDHYREPFLNPVDREPLWRFPNELPIAGEPANIVALVEEYMDWLHQSPVPKLLFWGTPGVLIPPAEAARLAKSLPNCKAVDIGPGLNLLQEDNPDLIGSEIARWLSTLEISG

SEQ ID NO: 1495 - protein, 277 aa, Synthetic construct
MFHYVDVGPRDGTPVLFLHGNPTSSYVWRNIIPHVAPTHRCIAPDLIGMGKSEKPDLGYFFDDHVRFMDAFIEALGLEEVVLVIHDWGSALGFHWAKRNPERVKGIAFMEFIRPIPTWDEWPEFARETFQAFRTTDVGRKLIIDQNVFIEGTLPMGVVRPLTEVEMDHYREPFLNPVDREPLWRFPNELPIAGEPANIVALVEEYMDWLHQSPVPKLLFWGTPGVLIPPAEAARLAKSLPNCKAVDIGPGLNLLQEDNPDLIGSEIARWLSTLEISG

SEQ ID NO: 1496 - protein, 277 aa, Synthetic construct
MFHYVDVGPRDGTPVLFLHGNPTSSYVWRNIIPHVAPTHRCIAPDLIGMGKSSKPDLGYFFDDHVRFMDAFIEALGLEEVVLVIHDWGSALGFHWAKRNPERVKGIAFMEFIRPIPTWDEWPEFARETFQAFRTTDVGRKLIIDQNVFIEGTLPMGVVRPLTEVEMDHYREPFLNPVDREPLWRFPNELPIAGEPANIVALVEEYMDWLHQSPVPKLLFWGTPGVLIPPAEAARLAKSLPNCKAVDIGPGLNLLQEDNPDLIGSEIARWLSTLEISG

SEQ ID NO: 1497 - protein, 277 aa, Synthetic construct
MFHYVDVGPRDGTPVLFLHGNPTSSYVWRNIIPHVAPTHRCIAPDLIGMGKSAKPDLGYFFDDHVRFMDAFIEALGLEEVVLVIHDWGSALGFHWAKRNPERVKGIAFMEFIRPIPTWDEWPEFARETFQAFRTTDVGRKLIIDQNVFIEGTLPMGVVRPLTEVEMDHYREPFLNPVDREPLWRFPNELPIAGEPANIVALVEEYMDWLHQSPVPKLLFWGTPGVLIPPAEAARLAKSLPNCKAVDIGPGLNLLQEDNPDLIGSEIARWLSTLEISG

SEQ ID NO: 1498 - protein, 277 aa, Synthetic construct
MFHYVDVGPRDGTPVLFLHGNPTSSYVWRNIIPHVAPTHRCIAPDLIGMGKSQKPDLGYFFDDHVRFMDAFIEALGLEEVVLVIHDWGSALGFHWAKRNPERVKGIAFMEFIRPIPTWDEWPEFARETFQAFRTTDVGRKLIIDQNVFIEGTLPMGVVRPLTEVEMDHYREPFLNPVDREPLWRFPNELPIAGEPANIVALVEEYMDWLHQSPVPKLLFWGTPGVLIPPAEAARLAKSLPNCKAVDIGPGLNLLQEDNPDLIGSEIARWLSTLEISG

SEQ ID NO: 1499 - protein, 277 aa, Synthetic construct
MFHYVDVGPRDGTPVLFLHGNPTSSYVWRNIIPHVAPTHRCIAPDLIGMGKSTKPDLGYFFDDHVRFMDAFIEALGLEEVVLVIHDWGSALGFHWAKRNPERVKGIAFMEFIRPIPTWDEWPEFARETFQAFRTTDVGRKLIIDQNVFIEGTLPMGVVRPLTEVEMDHYREPFLNPVDREPLWRFPNELPIAGEPANIVALVEEYMDWLHQSPVPKLLFWGTPGVLIPPAEAARLAKSLPNCKAVDIGPGLNLLQEDNPDLIGSEIARWLSTLEISG

SEQ ID NO: 1500 - protein, 277 aa, Synthetic construct
MFHYVDVGPRDGTPVLFLHGNPTSSYVWRNIIPHVAPTHRCIAPDLIGMGKSDRPDLGYFFDDHVRFMDAFIEALGLEEVVLVIHDWGSALGFHWAKRNPERVKGIAFMEFIRPIPTWDEWPEFARETFQAFRTTDVGRKLIIDQNVFIEGTLPMGVVRPLTEVEMDHYREPFLNPVDREPLWRFPNELPIAGEPANIVALVEEYMDWLHQSPVPKLLFWGTPGVLIPPAEAARLAKSLPNCKAVDIGPGLNLLQEDNPDLIGSEIARWLSTLEISG

SEQ ID NO: 1501 - protein, 277 aa, Synthetic construct
MFHYVDVGPRDGTPVLFLHGNPTSSYVWRNIIPHVAPTHRCIAPDLIGMGKSDAPDLGYFFDDHVRFMDAFIEALGLEEVVLVIHDWGSALGFHWAKRNPERVKGIAFMEFIRPIPTWDEWPEFARETFQAFRTTDVGRKLIIDQNVFIEGTLPMGVVRPLTEVEMDHYREPFLNPVDREPLWRFPNELPIAGEPANIVALVEEYMDWLHQSPVPKLLFWGTPGVLIPPAEAARLAKSLPNCKAVDIGPGLNLLQEDNPDLIGSEIARWLSTLEISG

SEQ ID NO: 1502 - protein, 277 aa, Synthetic construct
MFHYVDVGPRDGTPVLFLHGNPTSSYVWRNIIPHVAPTHRCIAPDLIGMGKSDTPDLGYFFDDHVRFMDAFIEALGLEEVVLVIHDWGSALGFHWAKRNPERVKGIAFMEFIRPIPTWDEWPEFARETFQAFRTTDVGRKLIIDQNVFIEGTLPMGVVRPLTEVEMDHYREPFLNPVDREPLWRFPNELPIAGEPANIVALVEEYMDWLHQSPVPKLLFWGTPGVLIPPAEAARLAKSLPNCKAVDIGPGLNLLQEDNPDLIGSEIARWLSTLEISG

SEQ ID NO: 1503 - protein, 277 aa, Synthetic construct
MFHYVDVGPRDGTPVLFLHGNPTSSYVWRNIIPHVAPTHRCIAPDLIGMGKSDQPDLGYFFDDHVRFMDAFIEALGLEEVVLVIHDWGSALGFHWAKRNPERVKGIAFMEFIRPIPTWDEWPEFARETFQAFRTTDVGRKLIIDQNVFIEGTLPMGVVRPLTEVEMDHYREPFLNPVDREPLWRFPNELPIAGEPANIVALVEEYMDWLHQSPVPKLLFWGTPGVLIPPAEAARLAKSLPNCKAVDIGPGLNLLQEDNPDLIGSEIARWLSTLEISG

SEQ ID NO: 1504 - protein, 277 aa, Synthetic construct
MFHYVDVGPRDGTPVLFLHGNPTSSYVWRNIIPHVAPTHRCIAPDLIGMGKSDSPDLGYFFDDHVRFMDAFIEALGLEEVVLVIHDWGSALGFHWAKRNPERVKGIAFMEFIRPIPTWDEWPEFARETFQAFRTTDVGRKLIIDQNVFIEGTLPMGVVRPLTEVEMDHYREPFLNPVDREPLWRFPNELPIAGEPANIVALVEEYMDWLHQSPVPKLLFWGTPGVLIPPAEAARLAKSLPNCKAVDIGPGLNLLQEDNPDLIGSEIARWLSTLEISG

SEQ ID NO: 1505 - protein, 277 aa, Synthetic construct
MFHYVDVGPRDGTPVLFLHGNPTSSYVWRNIIPHVAPTHRCIAPDLIGMGKSDHPDLGYFFDDHVRFMDAFIEALGLEEVVLVIHDWGSALGFHWAKRNPERVKGIAFMEFIRPIPTWDEWPEFARETFQAFRTTDVGRKLIIDQNVFIEGTLPMGVVRPLTEVEMDHYREPFLNPVDREPLWRFPNELPIAGEPANIVALVEEYMDWLHQSPVPKLLFWGTPGVLIPPAEAARLAKSLPNCKAVDIGPGLNLLQEDNPDLIGSEIARWLSTLEISG

SEQ ID NO: 1506 - protein, 277 aa, Synthetic construct
MFHYVDVGPRDGTPVLFLHGNPTSSYVWRNIIPHVAPTHRCIAPDLIGMGKSDKADLGYFFDDHVRFMDAFIEALGLEEVVLVIHDWGSALGFHWAKRNPERVKGIAFMEFIRPIPTWDEWPEFARETFQAFRTTDVGRKLIIDQNVFIEGTLPMGVVRPLTEVEMDHYREPFLNPVDREPLWRFPNELPIAGEPANIVALVEEYMDWLHQSPVPKLLFWGTPGVLIPPAEAARLAKSLPNCKAVDIGPGLNLLQEDNPDLIGSEIARWLSTLEISG

SEQ ID NO: 1507 - protein, 277 aa, Synthetic construct
MFHYVDVGPRDGTPVLFLHGNPTSSYVWRNIIPHVAPTHRCIAPDLIGMGKSDKTDLGYFFDDHVRFMDAFIEALGLEEVVLVIHDWGSALGFHWAKRNPERVKGIAFMEFIRPIPTWDEWPEFARETFQAFRTTDVGRKLIIDQNVFIEGTLPMGVVRPLTEVEMDHYREPFLNPVDREPLWRFPNELPIAGEPANIVALVEEYMDWLHQSPVPKLLFWGTPGVLIPPAEAARLAKSLPNCKAVDIGPGLNLLQEDNPDLIGSEIARWLSTLEISG

SEQ ID NO: 1508 - protein, 277 aa, Synthetic construct
MFHYVDVGPRDGTPVLFLHGNPTSSYVWRNIIPHVAPTHRCIAPDLIGMGKSDKLDLGYFFDDHVRFMDAFIEALGLEEVVLVIHDWGSALGFHWAKRNPERVKGIAFMEFIRPIPTWDEWPEFARETFQAFRTTDVGRKLIIDQNVFIEGTLPMGVVRPLTEVEMDHYREPFLNPVDREPLWRFPNELPIAGEPANIVALVEEYMDWLHQSPVPKLLFWGTPGVLIPPAEAARLAKSLPNCKAVDIGPGLNLLQEDNPDLIGSEIARWLSTLEISG

SEQ ID NO: 1509 - protein, 277 aa, Synthetic construct
MFHYVDVGPRDGTPVLFLHGNPTSSYVWRNIIPHVAPTHRCIAPDLIGMGKSDKVDLGYFFDDHVRFMDAFIEALGLEEVVLVIHDWGSALGFHWAKRNPERVKGIAFMEFIRPIPTWDEWPEFARETFQAFRTTDVGRKLIIDQNVFIEGTLPMGVVRPLTEVEMDHYREPFLNPVDREPLWRFPNELPIAGEPANIVALVEEYMDWLHQSPVPKLLFWGTPGVLIPPAEAARLAKSLPNCKAVDIGPGLNLLQEDNPDLIGSEIARWLSTLEISG

SEQ ID NO: 1510 - protein, 277 aa, Synthetic construct
MFHYVDVGPRDGTPVLFLHGNPTSSYVWRNIIPHVAPTHRCIAPDLIGMGKSDKSDLGYFFDDHVRFMDAFIEALGLEEVVLVIHDWGSALGFHWAKRNPERVKGIAFMEFIRPIPTWDEWPEFARETFQAFRTTDVGRKLIIDQNVFIEGTLPMGVVRPLTEVEMDHYREPFLNPVDREPLWRFPNELPIAGEPANIVALVEEYMDWLHQSPVPKLLFWGTPGVLIPPAEAARLAKSLPNCKAVDIGPGLNLLQEDNPDLIGSEIARWLSTLEISG

SEQ ID NO: 1511 - protein, 277 aa, Synthetic construct
MFHYVDVGPRDGTPVLFLHGNPTSSYVWRNIIPHVAPTHRCIAPDLIGMGKSDKRDLGYFFDDHVRFMDAFIEALGLEEVVLVIHDWGSALGFHWAKRNPERVKGIAFMEFIRPIPTWDEWPEFARETFQAFRTTDVGRKLIIDQNVFIEGTLPMGVVRPLTEVEMDHYREPFLNPVDREPLWRFPNELPIAGEPANIVALVEEYMDWLHQSPVPKLLFWGTPGVLIPPAEAARLAKSLPNCKAVDIGPGLNLLQEDNPDLIGSEIARWLSTLEISG

SEQ ID NO: 1512 - protein, 277 aa, Synthetic construct
MFHYVDVGPRDGTPVLFLHGNPTSSYVWRNIIPHVAPTHRCIAPDLIGMGKSDKPELGYFFDDHVRFMDAFIEALGLEEVVLVIHDWGSALGFHWAKRNPERVKGIAFMEFIRPIPTWDEWPEFARETFQAFRTTDVGRKLIIDQNVFIEGTLPMGVVRPLTEVEMDHYREPFLNPVDREPLWRFPNELPIAGEPANIVALVEEYMDWLHQSPVPKLLFWGTPGVLIPPAEAARLAKSLPNCKAVDIGPGLNLLQEDNPDLIGSEIARWLSTLEISG

SEQ ID NO: 1513 - protein, 277 aa, Synthetic construct
MFHYVDVGPRDGTPVLFLHGNPTSSYVWRNIIPHVAPTHRCIAPDLIGMGKSDKPALGYFFDDHVRFMDAFIEALGLEEVVLVIHDWGSALGFHWAKRNPERVKGIAFMEFIRPIPTWDEWPEFARETFQAFRTTDVGRKLIIDQNVFIEGTLPMGVVRPLTEVEMDHYREPFLNPVDREPLWRFPNELPIAGEPANIVALVEEYMDWLHQSPVPKLLFWGTPGVLIPPAEAARLAKSLPNCKAVDIGPGLNLLQEDNPDLIGSEIARWLSTLEISG

SEQ ID NO: 1514 - protein, 277 aa, Synthetic construct
MFHYVDVGPRDGTPVLFLHGNPTSSYVWRNIIPHVAPTHRCIAPDLIGMGKSDKPSLGYFFDDHVRFMDAFIEALGLEEVVLVIHDWGSALGFHWAKRNPERVKGIAFMEFIRPIPTWDEWPEFARETFQAFRTTDVGRKLIIDQNVFIEGTLPMGVVRPLTEVEMDHYREPFLNPVDREPLWRFPNELPIAGEPANIVALVEEYMDWLHQSPVPKLLFWGTPGVLIPPAEAARLAKSLPNCKAVDIGPGLNLLQEDNPDLIGSEIARWLSTLEISG

SEQ ID NO: 1515 - protein, 277 aa, Synthetic construct
MFHYVDVGPRDGTPVLFLHGNPTSSYVWRNIIPHVAPTHRCIAPDLIGMGKSDKPNLGYFFDDHVRFMDAFIEALGLEEVVLVIHDWGSALGFHWAKRNPERVKGIAFMEFIRPIPTWDEWPEFARETFQAFRTTDVGRKLIIDQNVFIEGTLPMGVVRPLTEVEMDHYREPFLNPVDREPLWRFPNELPIAGEPANIVALVEEYMDWLHQSPVPKLLFWGTPGVLIPPAEAARLAKSLPNCKAVDIGPGLNLLQEDNPDLIGSEIARWLSTLEISG

SEQ ID NO: 1516 - protein, 277 aa, Synthetic construct
MFHYVDVGPRDGTPVLFLHGNPTSSYVWRNIIPHVAPTHRCIAPDLIGMGKSDKPGLGYFFDDHVRFMDAFIEALGLEEVVLVIHDWGSALGFHWAKRNPERVKGIAFMEFIRPIPTWDEWPEFARETFQAFRTTDVGRKLIIDQNVFIEGTLPMGVVRPLTEVEMDHYREPFLNPVDREPLWRFPNELPIAGEPANIVALVEEYMDWLHQSPVPKLLFWGTPGVLIPPAEAARLAKSLPNCKAVDIGPGLNLLQEDNPDLIGSEIARWLSTLEISG

SEQ ID NO: 1517 - protein, 277 aa, Synthetic construct
MFHYVDVGPRDGTPVLFLHGNPTSSYVWRNIIPHVAPTHRCIAPDLIGMGKSDKPPLGYFFDDHVRFMDAFIEALGLEEVVLVIHDWGSALGFHWAKRNPERVKGIAFMEFIRPIPTWDEWPEFARETFQAFRTTDVGRKLIIDQNVFIEGTLPMGVVRPLTEVEMDHYREPFLNPVDREPLWRFPNELPIAGEPANIVALVEEYMDWLHQSPVPKLLFWGTPGVLIPPAEAARLAKSLPNCKAVDIGPGLNLLQEDNPDLIGSEIARWLSTLEISG

SEQ ID NO: 1518 - protein, 277 aa, Synthetic construct
MFHYVDVGPRDGTPVLFLHGNPTSSYVWRNIIPHVAPTHRCIAPDLIGMGKSDKPDIGYFFDDHVRFMDAFIEALGLEEVVLVIHDWGSALGFHWAKRNPERVKGIAFMEFIRPIPTWDEWPEFARETFQAFRTTDVGRKLIIDQNVFIEGTLPMGVVRPLTEVEMDHYREPFLNPVDREPLWRFPNELPIAGEPANIVALVEEYMDWLHQSPVPKLLFWGTPGVLIPPAEAARLAKSLPNCKAVDIGPGLNLLQEDNPDLIGSEIARWLSTLEISG

SEQ ID NO: 1519 - protein, 277 aa, Synthetic construct
MFHYVDVGPRDGTPVLFLHGNPTSSYVWRNIIPHVAPTHRCIAPDLIGMGKSDKPDVGYFFDDHVRFMDAFIEALGLEEVVLVIHDWGSALGFHWAKRNPERVKGIAFMEFIRPIPTWDEWPEFARETFQAFRTTDVGRKLIIDQNVFIEGTLPMGVVRPLTEVEMDHYREPFLNPVDREPLWRFPNELPIAGEPANIVALVEEYMDWLHQSPVPKLLFWGTPGVLIPPAEAARLAKSLPNCKAVDIGPGLNLLQEDNPDLIGSEIARWLSTLEISG

SEQ ID NO: 1520 - protein, 277 aa, Synthetic construct
MFHYVDVGPRDGTPVLFLHGNPTSSYVWRNIIPHVAPTHRCIAPDLIGMGKSDKPDTGYFFDDHVRFMDAFIEALGLEEVVLVIHDWGSALGFHWAKRNPERVKGIAFMEFIRPIPTWDEWPEFARETFQAFRTTDVGRKLIIDQNVFIEGTLPMGVVRPLTEVEMDHYREPFLNPVDREPLWRFPNELPIAGEPANIVALVEEYMDWLHQSPVPKLLFWGTPGVLIPPAEAARLAKSLPNCKAVDIGPGLNLLQEDNPDLIGSEIARWLSTLEISG

SEQ ID NO: 1521 - protein, 277 aa, Synthetic construct
MFHYVDVGPRDGTPVLFLHGNPTSSYVWRNIIPHVAPTHRCIAPDLIGMGKSDKPDRGYFFDDHVRFMDAFIEALGLEEVVLVIHDWGSALGFHWAKRNPERVKGIAFMEFIRPIPTWDEWPEFARETFQAFRTTDVGRKLIIDQNVFIEGTLPMGVVRPLTEVEMDHYREPFLNPVDREPLWRFPNELPIAGEPANIVALVEEYMDWLHQSPVPKLLFWGTPGVLIPPAEAARLAKSLPNCKAVDIGPGLNLLQEDNPDLIGSEIARWLSTLEISG

SEQ ID NO: 1522 - protein, 277 aa, Synthetic construct
MFHYVDVGPRDGTPVLFLHGNPTSSYVWRNIIPHVAPTHRCIAPDLIGMGKSDKPDAGYFFDDHVRFMDAFIEALGLEEVVLVIHDWGSALGFHWAKRNPERVKGIAFMEFIRPIPTWDEWPEFARETFQAFRTTDVGRKLIIDQNVFIEGTLPMGVVRPLTEVEMDHYREPFLNPVDREPLWRFPNELPIAGEPANIVALVEEYMDWLHQSPVPKLLFWGTPGVLIPPAEAARLAKSLPNCKAVDIGPGLNLLQEDNPDLIGSEIARWLSTLEISG

SEQ ID NO: 1523 - protein, 277 aa, Synthetic construct
MFHYVDVGPRDGTPVLFLHGNPTSSYVWRNIIPHVAPTHRCIAPDLIGMGKSDKPDGGYFFDDHVRFMDAFIEALGLEEVVLVIHDWGSALGFHWAKRNPERVKGIAFMEFIRPIPTWDEWPEFARETFQAFRTTDVGRKLIIDQNVFIEGTLPMGVVRPLTEVEMDHYREPFLNPVDREPLWRFPNELPIAGEPANIVALVEEYMDWLHQSPVPKLLFWGTPGVLIPPAEAARLAKSLPNCKAVDIGPGLNLLQEDNPDLIGSEIARWLSTLEISG

SEQ ID NO: 1524 - protein, 277 aa, Synthetic construct
MFHYVDVGPRDGTPVLFLHGNPTSSYVWRNIIPHVAPTHRCIAPDLIGMGKSDKPDLAYFFDDHVRFMDAFIEALGLEEVVLVIHDWGSALGFHWAKRNPERVKGIAFMEFIRPIPTWDEWPEFARETFQAFRTTDVGRKLIIDQNVFIEGTLPMGVVRPLTEVEMDHYREPFLNPVDREPLWRFPNELPIAGEPANIVALVEEYMDWLHQSPVPKLLFWGTPGVLIPPAEAARLAKSLPNCKAVDIGPGLNLLQEDNPDLIGSEIARWLSTLEISG

SEQ ID NO: 1525 - protein, 277 aa, Synthetic construct
MFHYVDVGPRDGTPVLFLHGNPTSSYVWRNIIPHVAPTHRCIAPDLIGMGKSDKPDLPYFFDDHVRFMDAFIEALGLEEVVLVIHDWGSALGFHWAKRNPERVKGIAFMEFIRPIPTWDEWPEFARETFQAFRTTDVGRKLIIDQNVFIEGTLPMGVVRPLTEVEMDHYREPFLNPVDREPLWRFPNELPIAGEPANIVALVEEYMDWLHQSPVPKLLFWGTPGVLIPPAEAARLAKSLPNCKAVDIGPGLNLLQEDNPDLIGSEIARWLSTLEISG

SEQ ID NO: 1526 - protein, 277 aa, Synthetic construct
MFHYVDVGPRDGTPVLFLHGNPTSSYVWRNIIPHVAPTHRCIAPDLIGMGKSDKPDLSYFFDDHVRFMDAFIEALGLEEVVLVIHDWGSALGFHWAKRNPERVKGIAFMEFIRPIPTWDEWPEFARETFQAFRTTDVGRKLIIDQNVFIEGTLPMGVVRPLTEVEMDHYREPFLNPVDREPLWRFPNELPIAGEPANIVALVEEYMDWLHQSPVPKLLFWGTPGVLIPPAEAARLAKSLPNCKAVDIGPGLNLLQEDNPDLIGSEIARWLSTLEISG

SEQ ID NO: 1527 - protein, 277 aa, Synthetic construct
MFHYVDVGPRDGTPVLFLHGNPTSSYVWRNIIPHVAPTHRCIAPDLIGMGKSDKPDLDYFFDDHVRFMDAFIEALGLEEVVLVIHDWGSALGFHWAKRNPERVKGIAFMEFIRPIPTWDEWPEFARETFQAFRTTDVGRKLIIDQNVFIEGTLPMGVVRPLTEVEMDHYREPFLNPVDREPLWRFPNELPIAGEPANIVALVEEYMDWLHQSPVPKLLFWGTPGVLIPPAEAARLAKSLPNCKAVDIGPGLNLLQEDNPDLIGSEIARWLSTLEISG

SEQ ID NO: 1528 - protein, 277 aa, Synthetic construct
MFHYVDVGPRDGTPVLFLHGNPTSSYVWRNIIPHVAPTHRCIAPDLIGMGKSDKPDLEYFFDDHVRFMDAFIEALGLEEVVLVIHDWGSALGFHWAKRNPERVKGIAFMEFIRPIPTWDEWPEFARETFQAFRTTDVGRKLIIDQNVFIEGTLPMGVVRPLTEVEMDHYREPFLNPVDREPLWRFPNELPIAGEPANIVALVEEYMDWLHQSPVPKLLFWGTPGVLIPPAEAARLAKSLPNCKAVDIGPGLNLLQEDNPDLIGSEIARWLSTLEISG

SEQ ID NO: 1529 - protein, 277 aa, Synthetic construct
MFHYVDVGPRDGTPVLFLHGNPTSSYVWRNIIPHVAPTHRCIAPDLIGMGKSDKPDLTYFFDDHVRFMDAFIEALGLEEVVLVIHDWGSALGFHWAKRNPERVKGIAFMEFIRPIPTWDEWPEFARETFQAFRTTDVGRKLIIDQNVFIEGTLPMGVVRPLTEVEMDHYREPFLNPVDREPLWRFPNELPIAGEPANIVALVEEYMDWLHQSPVPKLLFWGTPGVLIPPAEAARLAKSLPNCKAVDIGPGLNLLQEDNPDLIGSEIARWLSTLEISG

SEQ ID NO: 1530 - protein, 277 aa, Synthetic construct
MFHYVDVGPRDGTPVLFLHGNPTSSYVWRNIIPHVAPTHRCIAPDLIGMGKSDKPDLGFFFDDHVRFMDAFIEALGLEEVVLVIHDWGSALGFHWAKRNPERVKGIAFMEFIRPIPTWDEWPEFARETFQAFRTTDVGRKLIIDQNVFIEGTLPMGVVRPLTEVEMDHYREPFLNPVDREPLWRFPNELPIAGEPANIVALVEEYMDWLHQSPVPKLLFWGTPGVLIPPAEAARLAKSLPNCKAVDIGPGLNLLQEDNPDLIGSEIARWLSTLEISG

SEQ ID NO: 1531 - protein, 277 aa, Synthetic construct
MFHYVDVGPRDGTPVLFLHGNPTSSYVWRNIIPHVAPTHRCIAPDLIGMGKSDKPDLGHFFDDHVRFMDAFIEALGLEEVVLVIHDWGSALGFHWAKRNPERVKGIAFMEFIRPIPTWDEWPEFARETFQAFRTTDVGRKLIIDQNVFIEGTLPMGVVRPLTEVEMDHYREPFLNPVDREPLWRFPNELPIAGEPANIVALVEEYMDWLHQSPVPKLLFWGTPGVLIPPAEAARLAKSLPNCKAVDIGPGLNLLQEDNPDLIGSEIARWLSTLEISG

SEQ ID NO: 1532 - protein, 277 aa, Synthetic construct
MFHYVDVGPRDGTPVLFLHGNPTSSYVWRNIIPHVAPTHRCIAPDLIGMGKSDKPDLGCFFDDHVRFMDAFIEALGLEEVVLVIHDWGSALGFHWAKRNPERVKGIAFMEFIRPIPTWDEWPEFARETFQAFRTTDVGRKLIIDQNVFIEGTLPMGVVRPLTEVEMDHYREPFLNPVDREPLWRFPNELPIAGEPANIVALVEEYMDWLHQSPVPKLLFWGTPGVLIPPAEAARLAKSLPNCKAVDIGPGLNLLQEDNPDLIGSEIARWLSTLEISG

SEQ ID NO: 1533 - protein, 277 aa, Synthetic construct
MFHYVDVGPRDGTPVLFLHGNPTSSYVWRNIIPHVAPTHRCIAPDLIGMGKSDKPDLGWFFDDHVRFMDAFIEALGLEEVVLVIHDWGSALGFHWAKRNPERVKGIAFMEFIRPIPTWDEWPEFARETFQAFRTTDVGRKLIIDQNVFIEGTLPMGVVRPLTEVEMDHYREPFLNPVDREPLWRFPNELPIAGEPANIVALVEEYMDWLHQSPVPKLLFWGTPGVLIPPAEAARLAKSLPNCKAVDIGPGLNLLQEDNPDLIGSEIARWLSTLEISG

SEQ ID NO: 1534 - protein, 277 aa, Synthetic construct
MFHYVDVGPRDGTPVLFLHGNPTSSYVWRNIIPHVAPTHRCIAPDLIGMGKSDKPDLGLFFDDHVRFMDAFIEALGLEEVVLVIHDWGSALGFHWAKRNPERVKGIAFMEFIRPIPTWDEWPEFARETFQAFRTTDVGRKLIIDQNVFIEGTLPMGVVRPLTEVEMDHYREPFLNPVDREPLWRFPNELPIAGEPANIVALVEEYMDWLHQSPVPKLLFWGTPGVLIPPAEAARLAKSLPNCKAVDIGPGLNLLQEDNPDLIGSEIARWLSTLEISG

SEQ ID NO: 1535 - protein, 277 aa, Synthetic construct
MFHYVDVGPRDGTPVLFLHGNPTSSYVWRNIIPHVAPTHRCIAPDLIGMGKSDKPDLGNFFDDHVRFMDAFIEALGLEEVVLVIHDWGSALGFHWAKRNPERVKGIAFMEFIRPIPTWDEWPEFARETFQAFRTTDVGRKLIIDQNVFIEGTLPMGVVRPLTEVEMDHYREPFLNPVDREPLWRFPNELPIAGEPANIVALVEEYMDWLHQSPVPKLLFWGTPGVLIPPAEAARLAKSLPNCKAVDIGPGLNLLQEDNPDLIGSEIARWLSTLEISG

SEQ ID NO: 1536 - protein, 277 aa, Synthetic construct
MFHYVDVGPRDGTPVLFLHGNPTSSYVWRNIIPHVAPTHRCIAPDLIGMGKSDKPDLGYRFDDHVRFMDAFIEALGLEEVVLVIHDWGSALGFHWAKRNPERVKGIAFMEFIRPIPTWDEWPEFARETFQAFRTTDVGRKLIIDQNVFIEGTLPMGVVRPLTEVEMDHYREPFLNPVDREPLWRFPNELPIAGEPANIVALVEEYMDWLHQSPVPKLLFWGTPGVLIPPAEAARLAKSLPNCKAVDIGPGLNLLQEDNPDLIGSEIARWLSTLEISG

SEQ ID NO: 1537 - protein, 277 aa, Synthetic construct
MFHYVDVGPRDGTPVLFLHGNPTSSYVWRNIIPHVAPTHRCIAPDLIGMGKSDKPDLGYTFDDHVRFMDAFIEALGLEEVVLVIHDWGSALGFHWAKRNPERVKGIAFMEFIRPIPTWDEWPEFARETFQAFRTTDVGRKLIIDQNVFIEGTLPMGVVRPLTEVEMDHYREPFLNPVDREPLWRFPNELPIAGEPANIVALVEEYMDWLHQSPVPKLLFWGTPGVLIPPAEAARLAKSLPNCKAVDIGPGLNLLQEDNPDLIGSEIARWLSTLEISG

SEQ ID NO: 1538 - protein, 277 aa, Synthetic construct
MFHYVDVGPRDGTPVLFLHGNPTSSYVWRNIIPHVAPTHRCIAPDLIGMGKSDKPDLGYSFDDHVRFMDAFIEALGLEEVVLVIHDWGSALGFHWAKRNPERVKGIAFMEFIRPIPTWDEWPEFARETFQAFRTTDVGRKLIIDQNVFIEGTLPMGVVRPLTEVEMDHYREPFLNPVDREPLWRFPNELPIAGEPANIVALVEEYMDWLHQSPVPKLLFWGTPGVLIPPAEAARLAKSLPNCKAVDIGPGLNLLQEDNPDLIGSEIARWLSTLEISG

SEQ ID NO: 1539 - protein, 277 aa, Synthetic construct
MFHYVDVGPRDGTPVLFLHGNPTSSYVWRNIIPHVAPTHRCIAPDLIGMGKSDKPDLGYAFDDHVRFMDAFIEALGLEEVVLVIHDWGSALGFHWAKRNPERVKGIAFMEFIRPIPTWDEWPEFARETFQAFRTTDVGRKLIIDQNVFIEGTLPMGVVRPLTEVEMDHYREPFLNPVDREPLWRFPNELPIAGEPANIVALVEEYMDWLHQSPVPKLLFWGTPGVLIPPAEAARLAKSLPNCKAVDIGPGLNLLQEDNPDLIGSEIARWLSTLEISG

SEQ ID NO: 1540 - protein, 277 aa, Synthetic construct
MFHYVDVGPRDGTPVLFLHGNPTSSYVWRNIIPHVAPTHRCIAPDLIGMGKSDKPDLGYKFDDHVRFMDAFIEALGLEEVVLVIHDWGSALGFHWAKRNPERVKGIAFMEFIRPIPTWDEWPEFARETFQAFRTTDVGRKLIIDQNVFIEGTLPMGVVRPLTEVEMDHYREPFLNPVDREPLWRFPNELPIAGEPANIVALVEEYMDWLHQSPVPKLLFWGTPGVLIPPAEAARLAKSLPNCKAVDIGPGLNLLQEDNPDLIGSEIARWLSTLEISG

SEQ ID NO: 1541 - protein, 277 aa, Synthetic construct
MFHYVDVGPRDGTPVLFLHGNPTSSYVWRNIIPHVAPTHRCIAPDLIGMGKSDKPDLGYVFDDHVRFMDAFIEALGLEEVVLVIHDWGSALGFHWAKRNPERVKGIAFMEFIRPIPTWDEWPEFARETFQAFRTTDVGRKLIIDQNVFIEGTLPMGVVRPLTEVEMDHYREPFLNPVDREPLWRFPNELPIAGEPANIVALVEEYMDWLHQSPVPKLLFWGTPGVLIPPAEAARLAKSLPNCKAVDIGPGLNLLQEDNPDLIGSEIARWLSTLEISG

SEQ ID NO: 1542 - protein, 277 aa, Synthetic construct
MFHYVDVGPRDGTPVLFLHGNPTSSYVWRNIIPHVAPTHRCIAPDLIGMGKSDKPDLGYFLDDHVRFMDAFIEALGLEEVVLVIHDWGSALGFHWAKRNPERVKGIAFMEFIRPIPTWDEWPEFARETFQAFRTTDVGRKLIIDQNVFIEGTLPMGVVRPLTEVEMDHYREPFLNPVDREPLWRFPNELPIAGEPANIVALVEEYMDWLHQSPVPKLLFWGTPGVLIPPAEAARLAKSLPNCKAVDIGPGLNLLQEDNPDLIGSEIARWLSTLEISG

SEQ ID NO: 1543 - protein, 277 aa, Synthetic construct
MFHYVDVGPRDGTPVLFLHGNPTSSYVWRNIIPHVAPTHRCIAPDLIGMGKSDKPDLGYFYDDHVRFMDAFIEALGLEEVVLVIHDWGSALGFHWAKRNPERVKGIAFMEFIRPIPTWDEWPEFARETFQAFRTTDVGRKLIIDQNVFIEGTLPMGVVRPLTEVEMDHYREPFLNPVDREPLWRFPNELPIAGEPANIVALVEEYMDWLHQSPVPKLLFWGTPGVLIPPAEAARLAKSLPNCKAVDIGPGLNLLQEDNPDLIGSEIARWLSTLEISG

SEQ ID NO: 1544 - protein, 277 aa, Synthetic construct
MFHYVDVGPRDGTPVLFLHGNPTSSYVWRNIIPHVAPTHRCIAPDLIGMGKSDKPDLGYFIDDHVRFMDAFIEALGLEEVVLVIHDWGSALGFHWAKRNPERVKGIAFMEFIRPIPTWDEWPEFARETFQAFRTTDVGRKLIIDQNVFIEGTLPMGVVRPLTEVEMDHYREPFLNPVDREPLWRFPNELPIAGEPANIVALVEEYMDWLHQSPVPKLLFWGTPGVLIPPAEAARLAKSLPNCKAVDIGPGLNLLQEDNPDLIGSEIARWLSTLEISG

SEQ ID NO: 1545 - protein, 277 aa, Synthetic construct
MFHYVDVGPRDGTPVLFLHGNPTSSYVWRNIIPHVAPTHRCIAPDLIGMGKSDKPDLGYFVDDHVRFMDAFIEALGLEEVVLVIHDWGSALGFHWAKRNPERVKGIAFMEFIRPIPTWDEWPEFARETFQAFRTTDVGRKLIIDQNVFIEGTLPMGVVRPLTEVEMDHYREPFLNPVDREPLWRFPNELPIAGEPANIVALVEEYMDWLHQSPVPKLLFWGTPGVLIPPAEAARLAKSLPNCKAVDIGPGLNLLQEDNPDLIGSEIARWLSTLEISG

SEQ ID NO: 1546 - protein, 277 aa, Synthetic construct
MFHYVDVGPRDGTPVLFLHGNPTSSYVWRNIIPHVAPTHRCIAPDLIGMGKSDKPDLGYFMDDHVRFMDAFIEALGLEEVVLVIHDWGSALGFHWAKRNPERVKGIAFMEFIRPIPTWDEWPEFARETFQAFRTTDVGRKLIIDQNVFIEGTLPMGVVRPLTEVEMDHYREPFLNPVDREPLWRFPNELPIAGEPANIVALVEEYMDWLHQSPVPKLLFWGTPGVLIPPAEAARLAKSLPNCKAVDIGPGLNLLQEDNPDLIGSEIARWLSTLEISG

SEQ ID NO: 1547 - protein, 277 aa, Synthetic construct
MFHYVDVGPRDGTPVLFLHGNPTSSYVWRNIIPHVAPTHRCIAPDLIGMGKSDKPDLGYFADDHVRFMDAFIEALGLEEVVLVIHDWGSALGFHWAKRNPERVKGIAFMEFIRPIPTWDEWPEFARETFQAFRTTDVGRKLIIDQNVFIEGTLPMGVVRPLTEVEMDHYREPFLNPVDREPLWRFPNELPIAGEPANIVALVEEYMDWLHQSPVPKLLFWGTPGVLIPPAEAARLAKSLPNCKAVDIGPGLNLLQEDNPDLIGSEIARWLSTLEISG

SEQ ID NO: 1548 - protein, 277 aa, Synthetic construct
MFHYVDVGPRDGTPVLFLHGNPTSSYVWRNIIPHVAPTHRCIAPDLIGMGKSDKPDLGYFFADHVRFMDAFIEALGLEEVVLVIHDWGSALGFHWAKRNPERVKGIAFMEFIRPIPTWDEWPEFARETFQAFRTTDVGRKLIIDQNVFIEGTLPMGVVRPLTEVEMDHYREPFLNPVDREPLWRFPNELPIAGEPANIVALVEEYMDWLHQSPVPKLLFWGTPGVLIPPAEAARLAKSLPNCKAVDIGPGLNLLQEDNPDLIGSEIARWLSTLEISG

SEQ ID NO: 1549 - protein, 277 aa, Synthetic construct
MFHYVDVGPRDGTPVLFLHGNPTSSYVWRNIIPHVAPTHRCIAPDLIGMGKSDKPDLGYFFEDHVRFMDAFIEALGLEEVVLVIHDWGSALGFHWAKRNPERVKGIAFMEFIRPIPTWDEWPEFARETFQAFRTTDVGRKLIIDQNVFIEGTLPMGVVRPLTEVEMDHYREPFLNPVDREPLWRFPNELPIAGEPANIVALVEEYMDWLHQSPVPKLLFWGTPGVLIPPAEAARLAKSLPNCKAVDIGPGLNLLQEDNPDLIGSEIARWLSTLEISG

SEQ ID NO: 1550 - protein, 277 aa, Synthetic construct
MFHYVDVGPRDGTPVLFLHGNPTSSYVWRNIIPHVAPTHRCIAPDLIGMGKSDKPDLGYFFVDHVRFMDAFIEALGLEEVVLVIHDWGSALGFHWAKRNPERVKGIAFMEFIRPIPTWDEWPEFARETFQAFRTTDVGRKLIIDQNVFIEGTLPMGVVRPLTEVEMDHYREPFLNPVDREPLWRFPNELPIAGEPANIVALVEEYMDWLHQSPVPKLLFWGTPGVLIPPAEAARLAKSLPNCKAVDIGPGLNLLQEDNPDLIGSEIARWLSTLEISG

SEQ ID NO: 1551 - protein, 277 aa, Synthetic construct
MFHYVDVGPRDGTPVLFLHGNPTSSYVWRNIIPHVAPTHRCIAPDLIGMGKSDKPDLGYFFFDHVRFMDAFIEALGLEEVVLVIHDWGSALGFHWAKRNPERVKGIAFMEFIRPIPTWDEWPEFARETFQAFRTTDVGRKLIIDQNVFIEGTLPMGVVRPLTEVEMDHYREPFLNPVDREPLWRFPNELPIAGEPANIVALVEEYMDWLHQSPVPKLLFWGTPGVLIPPAEAARLAKSLPNCKAVDIGPGLNLLQEDNPDLIGSEIARWLSTLEISG

SEQ ID NO: 1552 - protein, 277 aa, Synthetic construct
MFHYVDVGPRDGTPVLFLHGNPTSSYVWRNIIPHVAPTHRCIAPDLIGMGKSDKPDLGYFFLDHVRFMDAFIEALGLEEVVLVIHDWGSALGFHWAKRNPERVKGIAFMEFIRPIPTWDEWPEFARETFQAFRTTDVGRKLIIDQNVFIEGTLPMGVVRPLTEVEMDHYREPFLNPVDREPLWRFPNELPIAGEPANIVALVEEYMDWLHQSPVPKLLFWGTPGVLIPPAEAARLAKSLPNCKAVDIGPGLNLLQEDNPDLIGSEIARWLSTLEISG

SEQ ID NO: 1553 - protein, 277 aa, Synthetic construct
MFHYVDVGPRDGTPVLFLHGNPTSSYVWRNIIPHVAPTHRCIAPDLIGMGKSDKPDLGYFFTDHVRFMDAFIEALGLEEVVLVIHDWGSALGFHWAKRNPERVKGIAFMEFIRPIPTWDEWPEFARETFQAFRTTDVGRKLIIDQNVFIEGTLPMGVVRPLTEVEMDHYREPFLNPVDREPLWRFPNELPIAGEPANIVALVEEYMDWLHQSPVPKLLFWGTPGVLIPPAEAARLAKSLPNCKAVDIGPGLNLLQEDNPDLIGSEIARWLSTLEISG

SEQ ID NO: 1554 - protein, 277 aa, Synthetic construct
MFHYVDVGPRDGTPVLFLHGNPTSSYVWRNIIPHVAPTHRCIAPDLIGMGKSDKPDLGYFFDEHVRFMDAFIEALGLEEVVLVIHDWGSALGFHWAKRNPERVKGIAFMEFIRPIPTWDEWPEFARETFQAFRTTDVGRKLIIDQNVFIEGTLPMGVVRPLTEVEMDHYREPFLNPVDREPLWRFPNELPIAGEPANIVALVEEYMDWLHQSPVPKLLFWGTPGVLIPPAEAARLAKSLPNCKAVDIGPGLNLLQEDNPDLIGSEIARWLSTLEISG

SEQ ID NO: 1555 - protein, 277 aa, Synthetic construct
MFHYVDVGPRDGTPVLFLHGNPTSSYVWRNIIPHVAPTHRCIAPDLIGMGKSDKPDLGYFFDAHVRFMDAFIEALGLEEVVLVIHDWGSALGFHWAKRNPERVKGIAFMEFIRPIPTWDEWPEFARETFQAFRTTDVGRKLIIDQNVFIEGTLPMGVVRPLTEVEMDHYREPFLNPVDREPLWRFPNELPIAGEPANIVALVEEYMDWLHQSPVPKLLFWGTPGVLIPPAEAARLAKSLPNCKAVDIGPGLNLLQEDNPDLIGSEIARWLSTLEISG

SEQ ID NO: 1556 - protein, 277 aa, Synthetic construct
MFHYVDVGPRDGTPVLFLHGNPTSSYVWRNIIPHVAPTHRCIAPDLIGMGKSDKPDLGYFFDQHVRFMDAFIEALGLEEVVLVIHDWGSALGFHWAKRNPERVKGIAFMEFIRPIPTWDEWPEFARETFQAFRTTDVGRKLIIDQNVFIEGTLPMGVVRPLTEVEMDHYREPFLNPVDREPLWRFPNELPIAGEPANIVALVEEYMDWLHQSPVPKLLFWGTPGVLIPPAEAARLAKSLPNCKAVDIGPGLNLLQEDNPDLIGSEIARWLSTLEISG

SEQ ID NO: 1557 - protein, 277 aa, Synthetic construct
MFHYVDVGPRDGTPVLFLHGNPTSSYVWRNIIPHVAPTHRCIAPDLIGMGKSDKPDLGYFFDNHVRFMDAFIEALGLEEVVLVIHDWGSALGFHWAKRNPERVKGIAFMEFIRPIPTWDEWPEFARETFQAFRTTDVGRKLIIDQNVFIEGTLPMGVVRPLTEVEMDHYREPFLNPVDREPLWRFPNELPIAGEPANIVALVEEYMDWLHQSPVPKLLFWGTPGVLIPPAEAARLAKSLPNCKAVDIGPGLNLLQEDNPDLIGSEIARWLSTLEISG

SEQ ID NO: 1558 - protein, 277 aa, Synthetic construct
MFHYVDVGPRDGTPVLFLHGNPTSSYVWRNIIPHVAPTHRCIAPDLIGMGKSDKPDLGYFFDTHVRFMDAFIEALGLEEVVLVIHDWGSALGFHWAKRNPERVKGIAFMEFIRPIPTWDEWPEFARETFQAFRTTDVGRKLIIDQNVFIEGTLPMGVVRPLTEVEMDHYREPFLNPVDREPLWRFPNELPIAGEPANIVALVEEYMDWLHQSPVPKLLFWGTPGVLIPPAEAARLAKSLPNCKAVDIGPGLNLLQEDNPDLIGSEIARWLSTLEISG

SEQ ID NO: 1559 - protein, 277 aa, Synthetic construct
MFHYVDVGPRDGTPVLFLHGNPTSSYVWRNIIPHVAPTHRCIAPDLIGMGKSDKPDLGYFFDHHVRFMDAFIEALGLEEVVLVIHDWGSALGFHWAKRNPERVKGIAFMEFIRPIPTWDEWPEFARETFQAFRTTDVGRKLIIDQNVFIEGTLPMGVVRPLTEVEMDHYREPFLNPVDREPLWRFPNELPIAGEPANIVALVEEYMDWLHQSPVPKLLFWGTPGVLIPPAEAARLAKSLPNCKAVDIGPGLNLLQEDNPDLIGSEIARWLSTLEISG

SEQ ID NO: 1560 - protein, 277 aa, Synthetic construct
MFHYVDVGPRDGTPVLFLHGNPTSSYVWRNIIPHVAPTHRCIAPDLIGMGKSDKPDLGYFFDDQVRFMDAFIEALGLEEVVLVIHDWGSALGFHWAKRNPERVKGIAFMEFIRPIPTWDEWPEFARETFQAFRTTDVGRKLIIDQNVFIEGTLPMGVVRPLTEVEMDHYREPFLNPVDREPLWRFPNELPIAGEPANIVALVEEYMDWLHQSPVPKLLFWGTPGVLIPPAEAARLAKSLPNCKAVDIGPGLNLLQEDNPDLIGSEIARWLSTLEISG

SEQ ID NO: 1561 - protein, 277 aa, Synthetic construct
MFHYVDVGPRDGTPVLFLHGNPTSSYVWRNIIPHVAPTHRCIAPDLIGMGKSDKPDLGYFFDDNVRFMDAFIEALGLEEVVLVIHDWGSALGFHWAKRNPERVKGIAFMEFIRPIPTWDEWPEFARETFQAFRTTDVGRKLIIDQNVFIEGTLPMGVVRPLTEVEMDHYREPFLNPVDREPLWRFPNELPIAGEPANIVALVEEYMDWLHQSPVPKLLFWGTPGVLIPPAEAARLAKSLPNCKAVDIGPGLNLLQEDNPDLIGSEIARWLSTLEISG

SEQ ID NO: 1562 - protein, 277 aa, Synthetic construct
MFHYVDVGPRDGTPVLFLHGNPTSSYVWRNIIPHVAPTHRCIAPDLIGMGKSDKPDLGYFFDDYVRFMDAFIEALGLEEVVLVIHDWGSALGFHWAKRNPERVKGIAFMEFIRPIPTWDEWPEFARETFQAFRTTDVGRKLIIDQNVFIEGTLPMGVVRPLTEVEMDHYREPFLNPVDREPLWRFPNELPIAGEPANIVALVEEYMDWLHQSPVPKLLFWGTPGVLIPPAEAARLAKSLPNCKAVDIGPGLNLLQEDNPDLIGSEIARWLSTLEISG

SEQ ID NO: 1563 - protein, 277 aa, Synthetic construct
MFHYVDVGPRDGTPVLFLHGNPTSSYVWRNIIPHVAPTHRCIAPDLIGMGKSDKPDLGYFFDDRVRFMDAFIEALGLEEVVLVIHDWGSALGFHWAKRNPERVKGIAFMEFIRPIPTWDEWPEFARETFQAFRTTDVGRKLIIDQNVFIEGTLPMGVVRPLTEVEMDHYREPFLNPVDREPLWRFPNELPIAGEPANIVALVEEYMDWLHQSPVPKLLFWGTPGVLIPPAEAARLAKSLPNCKAVDIGPGLNLLQEDNPDLIGSEIARWLSTLEISG

SEQ ID NO: 1564 - protein, 277 aa, Synthetic construct
MFHYVDVGPRDGTPVLFLHGNPTSSYVWRNIIPHVAPTHRCIAPDLIGMGKSDKPDLGYFFDDAVRFMDAFIEALGLEEVVLVIHDWGSALGFHWAKRNPERVKGIAFMEFIRPIPTWDEWPEFARETFQAFRTTDVGRKLIIDQNVFIEGTLPMGVVRPLTEVEMDHYREPFLNPVDREPLWRFPNELPIAGEPANIVALVEEYMDWLHQSPVPKLLFWGTPGVLIPPAEAARLAKSLPNCKAVDIGPGLNLLQEDNPDLIGSEIARWLSTLEISG

SEQ ID NO: 1565 - protein, 277 aa, Synthetic construct
MFHYVDVGPRDGTPVLFLHGNPTSSYVWRNIIPHVAPTHRCIAPDLIGMGKSDKPDLGYFFDDSVRFMDAFIEALGLEEVVLVIHDWGSALGFHWAKRNPERVKGIAFMEFIRPIPTWDEWPEFARETFQAFRTTDVGRKLIIDQNVFIEGTLPMGVVRPLTEVEMDHYREPFLNPVDREPLWRFPNELPIAGEPANIVALVEEYMDWLHQSPVPKLLFWGTPGVLIPPAEAARLAKSLPNCKAVDIGPGLNLLQEDNPDLIGSEIARWLSTLEISG

SEQ ID NO: 1566 - protein, 277 aa, Synthetic construct
MFHYVDVGPRDGTPVLFLHGNPTSSYVWRNIIPHVAPTHRCIAPDLIGMGKSDKPDLGYFFDDHARFMDAFIEALGLEEVVLVIHDWGSALGFHWAKRNPERVKGIAFMEFIRPIPTWDEWPEFARETFQAFRTTDVGRKLIIDQNVFIEGTLPMGVVRPLTEVEMDHYREPFLNPVDREPLWRFPNELPIAGEPANIVALVEEYMDWLHQSPVPKLLFWGTPGVLIPPAEAARLAKSLPNCKAVDIGPGLNLLQEDNPDLIGSEIARWLSTLEISG

SEQ ID NO: 1567 - protein, 277 aa, Synthetic construct
MFHYVDVGPRDGTPVLFLHGNPTSSYVWRNIIPHVAPTHRCIAPDLIGMGKSDKPDLGYFFDDHSRFMDAFIEALGLEEVVLVIHDWGSALGFHWAKRNPERVKGIAFMEFIRPIPTWDEWPEFARETFQAFRTTDVGRKLIIDQNVFIEGTLPMGVVRPLTEVEMDHYREPFLNPVDREPLWRFPNELPIAGEPANIVALVEEYMDWLHQSPVPKLLFWGTPGVLIPPAEAARLAKSLPNCKAVDIGPGLNLLQEDNPDLIGSEIARWLSTLEISG

SEQ ID NO: 1568 - protein, 277 aa, Synthetic construct
MFHYVDVGPRDGTPVLFLHGNPTSSYVWRNIIPHVAPTHRCIAPDLIGMGKSDKPDLGYFFDDHIRFMDAFIEALGLEEVVLVIHDWGSALGFHWAKRNPERVKGIAFMEFIRPIPTWDEWPEFARETFQAFRTTDVGRKLIIDQNVFIEGTLPMGVVRPLTEVEMDHYREPFLNPVDREPLWRFPNELPIAGEPANIVALVEEYMDWLHQSPVPKLLFWGTPGVLIPPAEAARLAKSLPNCKAVDIGPGLNLLQEDNPDLIGSEIARWLSTLEISG

SEQ ID NO: 1569 - protein, 277 aa, Synthetic construct
MFHYVDVGPRDGTPVLFLHGNPTSSYVWRNIIPHVAPTHRCIAPDLIGMGKSDKPDLGYFFDDHTRFMDAFIEALGLEEVVLVIHDWGSALGFHWAKRNPERVKGIAFMEFIRPIPTWDEWPEFARETFQAFRTTDVGRKLIIDQNVFIEGTLPMGVVRPLTEVEMDHYREPFLNPVDREPLWRFPNELPIAGEPANIVALVEEYMDWLHQSPVPKLLFWGTPGVLIPPAEAARLAKSLPNCKAVDIGPGLNLLQEDNPDLIGSEIARWLSTLEISG

SEQ ID NO: 1570 - protein, 277 aa, Synthetic construct
MFHYVDVGPRDGTPVLFLHGNPTSSYVWRNIIPHVAPTHRCIAPDLIGMGKSDKPDLGYFFDDHRRFMDAFIEALGLEEVVLVIHDWGSALGFHWAKRNPERVKGIAFMEFIRPIPTWDEWPEFARETFQAFRTTDVGRKLIIDQNVFIEGTLPMGVVRPLTEVEMDHYREPFLNPVDREPLWRFPNELPIAGEPANIVALVEEYMDWLHQSPVPKLLFWGTPGVLIPPAEAARLAKSLPNCKAVDIGPGLNLLQEDNPDLIGSEIARWLSTLEISG

SEQ ID NO: 1571 - protein, 277 aa, Synthetic construct
MFHYVDVGPRDGTPVLFLHGNPTSSYVWRNIIPHVAPTHRCIAPDLIGMGKSDKPDLGYFFDDHGRFMDAFIEALGLEEVVLVIHDWGSALGFHWAKRNPERVKGIAFMEFIRPIPTWDEWPEFARETFQAFRTTDVGRKLIIDQNVFIEGTLPMGVVRPLTEVEMDHYREPFLNPVDREPLWRFPNELPIAGEPANIVALVEEYMDWLHQSPVPKLLFWGTPGVLIPPAEAARLAKSLPNCKAVDIGPGLNLLQEDNPDLIGSEIARWLSTLEISG

SEQ ID NO: 1572 - protein, 277 aa, Synthetic construct
MFHYVDVGPRDGTPVLFLHGNPTSSYVWRNIIPHVAPTHRCIAPDLIGMGKSDKPDLGYFFDDHVAFMDAFIEALGLEEVVLVIHDWGSALGFHWAKRNPERVKGIAFMEFIRPIPTWDEWPEFARETFQAFRTTDVGRKLIIDQNVFIEGTLPMGVVRPLTEVEMDHYREPFLNPVDREPLWRFPNELPIAGEPANIVALVEEYMDWLHQSPVPKLLFWGTPGVLIPPAEAARLAKSLPNCKAVDIGPGLNLLQEDNPDLIGSEIARWLSTLEISG

SEQ ID NO: 1573 - protein, 277 aa, Synthetic construct
MFHYVDVGPRDGTPVLFLHGNPTSSYVWRNIIPHVAPTHRCIAPDLIGMGKSDKPDLGYFFDDHVKFMDAFIEALGLEEVVLVIHDWGSALGFHWAKRNPERVKGIAFMEFIRPIPTWDEWPEFARETFQAFRTTDVGRKLIIDQNVFIEGTLPMGVVRPLTEVEMDHYREPFLNPVDREPLWRFPNELPIAGEPANIVALVEEYMDWLHQSPVPKLLFWGTPGVLIPPAEAARLAKSLPNCKAVDIGPGLNLLQEDNPDLIGSEIARWLSTLEISG

SEQ ID NO: 1574 - protein, 277 aa, Synthetic construct
MFHYVDVGPRDGTPVLFLHGNPTSSYVWRNIIPHVAPTHRCIAPDLIGMGKSDKPDLGYFFDDHVQFMDAFIEALGLEEVVLVIHDWGSALGFHWAKRNPERVKGIAFMEFIRPIPTWDEWPEFARETFQAFRTTDVGRKLIIDQNVFIEGTLPMGVVRPLTEVEMDHYREPFLNPVDREPLWRFPNELPIAGEPANIVALVEEYMDWLHQSPVPKLLFWGTPGVLIPPAEAARLAKSLPNCKAVDIGPGLNLLQEDNPDLIGSEIARWLSTLEISG

SEQ ID NO: 1575 - protein, 277 aa, Synthetic construct
MFHYVDVGPRDGTPVLFLHGNPTSSYVWRNIIPHVAPTHRCIAPDLIGMGKSDKPDLGYFFDDHVSFMDAFIEALGLEEVVLVIHDWGSALGFHWAKRNPERVKGIAFMEFIRPIPTWDEWPEFARETFQAFRTTDVGRKLIIDQNVFIEGTLPMGVVRPLTEVEMDHYREPFLNPVDREPLWRFPNELPIAGEPANIVALVEEYMDWLHQSPVPKLLFWGTPGVLIPPAEAARLAKSLPNCKAVDIGPGLNLLQEDNPDLIGSEIARWLSTLEISG

SEQ ID NO: 1576 - protein, 277 aa, Synthetic construct
MFHYVDVGPRDGTPVLFLHGNPTSSYVWRNIIPHVAPTHRCIAPDLIGMGKSDKPDLGYFFDDHVGFMDAFIEALGLEEVVLVIHDWGSALGFHWAKRNPERVKGIAFMEFIRPIPTWDEWPEFARETFQAFRTTDVGRKLIIDQNVFIEGTLPMGVVRPLTEVEMDHYREPFLNPVDREPLWRFPNELPIAGEPANIVALVEEYMDWLHQSPVPKLLFWGTPGVLIPPAEAARLAKSLPNCKAVDIGPGLNLLQEDNPDLIGSEIARWLSTLEISG

SEQ ID NO: 1577 - protein, 277 aa, Synthetic construct
MFHYVDVGPRDGTPVLFLHGNPTSSYVWRNIIPHVAPTHRCIAPDLIGMGKSDKPDLGYFFDDHVEFMDAFIEALGLEEVVLVIHDWGSALGFHWAKRNPERVKGIAFMEFIRPIPTWDEWPEFARETFQAFRTTDVGRKLIIDQNVFIEGTLPMGVVRPLTEVEMDHYREPFLNPVDREPLWRFPNELPIAGEPANIVALVEEYMDWLHQSPVPKLLFWGTPGVLIPPAEAARLAKSLPNCKAVDIGPGLNLLQEDNPDLIGSEIARWLSTLEISG

SEQ ID NO: 1578 - protein, 277 aa, Synthetic construct
MFHYVDVGPRDGTPVLFLHGNPTSSYVWRNIIPHVAPTHRCIAPDLIGMGKSDKPDLGYFFDDHVRYMDAFIEALGLEEVVLVIHDWGSALGFHWAKRNPERVKGIAFMEFIRPIPTWDEWPEFARETFQAFRTTDVGRKLIIDQNVFIEGTLPMGVVRPLTEVEMDHYREPFLNPVDREPLWRFPNELPIAGEPANIVALVEEYMDWLHQSPVPKLLFWGTPGVLIPPAEAARLAKSLPNCKAVDIGPGLNLLQEDNPDLIGSEIARWLSTLEISG

SEQ ID NO: 1579 - protein, 277 aa, Synthetic construct
MFHYVDVGPRDGTPVLFLHGNPTSSYVWRNIIPHVAPTHRCIAPDLIGMGKSDKPDLGYFFDDHVRHMDAFIEALGLEEVVLVIHDWGSALGFHWAKRNPERVKGIAFMEFIRPIPTWDEWPEFARETFQAFRTTDVGRKLIIDQNVFIEGTLPMGVVRPLTEVEMDHYREPFLNPVDREPLWRFPNELPIAGEPANIVALVEEYMDWLHQSPVPKLLFWGTPGVLIPPAEAARLAKSLPNCKAVDIGPGLNLLQEDNPDLIGSEIARWLSTLEISG

SEQ ID NO: 1580 - protein, 277 aa, Synthetic construct
MFHYVDVGPRDGTPVLFLHGNPTSSYVWRNIIPHVAPTHRCIAPDLIGMGKSDKPDLGYFFDDHVRWMDAFIEALGLEEVVLVIHDWGSALGFHWAKRNPERVKGIAFMEFIRPIPTWDEWPEFARETFQAFRTTDVGRKLIIDQNVFIEGTLPMGVVRPLTEVEMDHYREPFLNPVDREPLWRFPNELPIAGEPANIVALVEEYMDWLHQSPVPKLLFWGTPGVLIPPAEAARLAKSLPNCKAVDIGPGLNLLQEDNPDLIGSEIARWLSTLEISG

SEQ ID NO: 1581 - protein, 277 aa, Synthetic construct
MFHYVDVGPRDGTPVLFLHGNPTSSYVWRNIIPHVAPTHRCIAPDLIGMGKSDKPDLGYFFDDHVRNMDAFIEALGLEEVVLVIHDWGSALGFHWAKRNPERVKGIAFMEFIRPIPTWDEWPEFARETFQAFRTTDVGRKLIIDQNVFIEGTLPMGVVRPLTEVEMDHYREPFLNPVDREPLWRFPNELPIAGEPANIVALVEEYMDWLHQSPVPKLLFWGTPGVLIPPAEAARLAKSLPNCKAVDIGPGLNLLQEDNPDLIGSEIARWLSTLEISG

SEQ ID NO: 1582 - protein, 277 aa, Synthetic construct
MFHYVDVGPRDGTPVLFLHGNPTSSYVWRNIIPHVAPTHRCIAPDLIGMGKSDKPDLGYFFDDHVRAMDAFIEALGLEEVVLVIHDWGSALGFHWAKRNPERVKGIAFMEFIRPIPTWDEWPEFARETFQAFRTTDVGRKLIIDQNVFIEGTLPMGVVRPLTEVEMDHYREPFLNPVDREPLWRFPNELPIAGEPANIVALVEEYMDWLHQSPVPKLLFWGTPGVLIPPAEAARLAKSLPNCKAVDIGPGLNLLQEDNPDLIGSEIARWLSTLEISG

SEQ ID NO: 1583 - protein, 277 aa, Synthetic construct
MFHYVDVGPRDGTPVLFLHGNPTSSYVWRNIIPHVAPTHRCIAPDLIGMGKSDKPDLGYFFDDHVRCMDAFIEALGLEEVVLVIHDWGSALGFHWAKRNPERVKGIAFMEFIRPIPTWDEWPEFARETFQAFRTTDVGRKLIIDQNVFIEGTLPMGVVRPLTEVEMDHYREPFLNPVDREPLWRFPNELPIAGEPANIVALVEEYMDWLHQSPVPKLLFWGTPGVLIPPAEAARLAKSLPNCKAVDIGPGLNLLQEDNPDLIGSEIARWLSTLEISG

SEQ ID NO: 1584 - protein, 277 aa, Synthetic construct
MFHYVDVGPRDGTPVLFLHGNPTSSYVWRNIIPHVAPTHRCIAPDLIGMGKSDKPDLGYFFDDHVRFLDAFIEALGLEEVVLVIHDWGSALGFHWAKRNPERVKGIAFMEFIRPIPTWDEWPEFARETFQAFRTTDVGRKLIIDQNVFIEGTLPMGVVRPLTEVEMDHYREPFLNPVDREPLWRFPNELPIAGEPANIVALVEEYMDWLHQSPVPKLLFWGTPGVLIPPAEAARLAKSLPNCKAVDIGPGLNLLQEDNPDLIGSEIARWLSTLEISG

SEQ ID NO: 1585 - protein, 277 aa, Synthetic construct
MFHYVDVGPRDGTPVLFLHGNPTSSYVWRNIIPHVAPTHRCIAPDLIGMGKSDKPDLGYFFDDHVRFIDAFIEALGLEEVVLVIHDWGSALGFHWAKRNPERVKGIAFMEFIRPIPTWDEWPEFARETFQAFRTTDVGRKLIIDQNVFIEGTLPMGVVRPLTEVEMDHYREPFLNPVDREPLWRFPNELPIAGEPANIVALVEEYMDWLHQSPVPKLLFWGTPGVLIPPAEAARLAKSLPNCKAVDIGPGLNLLQEDNPDLIGSEIARWLSTLEISG

SEQ ID NO: 1586 - protein, 277 aa, Synthetic construct
MFHYVDVGPRDGTPVLFLHGNPTSSYVWRNIIPHVAPTHRCIAPDLIGMGKSDKPDLGYFFDDHVRFVDAFIEALGLEEVVLVIHDWGSALGFHWAKRNPERVKGIAFMEFIRPIPTWDEWPEFARETFQAFRTTDVGRKLIIDQNVFIEGTLPMGVVRPLTEVEMDHYREPFLNPVDREPLWRFPNELPIAGEPANIVALVEEYMDWLHQSPVPKLLFWGTPGVLIPPAEAARLAKSLPNCKAVDIGPGLNLLQEDNPDLIGSEIARWLSTLEISG

SEQ ID NO: 1587 - protein, 277 aa, Synthetic construct
MFHYVDVGPRDGTPVLFLHGNPTSSYVWRNIIPHVAPTHRCIAPDLIGMGKSDKPDLGYFFDDHVRFFDAFIEALGLEEVVLVIHDWGSALGFHWAKRNPERVKGIAFMEFIRPIPTWDEWPEFARETFQAFRTTDVGRKLIIDQNVFIEGTLPMGVVRPLTEVEMDHYREPFLNPVDREPLWRFPNELPIAGEPANIVALVEEYMDWLHQSPVPKLLFWGTPGVLIPPAEAARLAKSLPNCKAVDIGPGLNLLQEDNPDLIGSEIARWLSTLEISG

SEQ ID NO: 1588 - protein, 277 aa, Synthetic construct
MFHYVDVGPRDGTPVLFLHGNPTSSYVWRNIIPHVAPTHRCIAPDLIGMGKSDKPDLGYFFDDHVRFTDAFIEALGLEEVVLVIHDWGSALGFHWAKRNPERVKGIAFMEFIRPIPTWDEWPEFARETFQAFRTTDVGRKLIIDQNVFIEGTLPMGVVRPLTEVEMDHYREPFLNPVDREPLWRFPNELPIAGEPANIVALVEEYMDWLHQSPVPKLLFWGTPGVLIPPAEAARLAKSLPNCKAVDIGPGLNLLQEDNPDLIGSEIARWLSTLEISG

SEQ ID NO: 1589 - protein, 277 aa, Synthetic construct
MFHYVDVGPRDGTPVLFLHGNPTSSYVWRNIIPHVAPTHRCIAPDLIGMGKSDKPDLGYFFDDHVRFADAFIEALGLEEVVLVIHDWGSALGFHWAKRNPERVKGIAFMEFIRPIPTWDEWPEFARETFQAFRTTDVGRKLIIDQNVFIEGTLPMGVVRPLTEVEMDHYREPFLNPVDREPLWRFPNELPIAGEPANIVALVEEYMDWLHQSPVPKLLFWGTPGVLIPPAEAARLAKSLPNCKAVDIGPGLNLLQEDNPDLIGSEIARWLSTLEISG

SEQ ID NO: 1590 - protein, 277 aa, Synthetic construct
MFHYVDVGPRDGTPVLFLHGNPTSSYVWRNIIPHVAPTHRCIAPDLIGMGKSDKPDLGYFFDDHVRFMEAFIEALGLEEVVLVIHDWGSALGFHWAKRNPERVKGIAFMEFIRPIPTWDEWPEFARETFQAFRTTDVGRKLIIDQNVFIEGTLPMGVVRPLTEVEMDHYREPFLNPVDREPLWRFPNELPIAGEPANIVALVEEYMDWLHQSPVPKLLFWGTPGVLIPPAEAARLAKSLPNCKAVDIGPGLNLLQEDNPDLIGSEIARWLSTLEISG

SEQ ID NO: 1591 - protein, 277 aa, Synthetic construct
MFHYVDVGPRDGTPVLFLHGNPTSSYVWRNIIPHVAPTHRCIAPDLIGMGKSDKPDLGYFFDDHVRFMNAFIEALGLEEVVLVIHDWGSALGFHWAKRNPERVKGIAFMEFIRPIPTWDEWPEFARETFQAFRTTDVGRKLIIDQNVFIEGTLPMGVVRPLTEVEMDHYREPFLNPVDREPLWRFPNELPIAGEPANIVALVEEYMDWLHQSPVPKLLFWGTPGVLIPPAEAARLAKSLPNCKAVDIGPGLNLLQEDNPDLIGSEIARWLSTLEISG

SEQ ID NO: 1592 - protein, 277 aa, Synthetic construct
MFHYVDVGPRDGTPVLFLHGNPTSSYVWRNIIPHVAPTHRCIAPDLIGMGKSDKPDLGYFFDDHVRFMGAFIEALGLEEVVLVIHDWGSALGFHWAKRNPERVKGIAFMEFIRPIPTWDEWPEFARETFQAFRTTDVGRKLIIDQNVFIEGTLPMGVVRPLTEVEMDHYREPFLNPVDREPLWRFPNELPIAGEPANIVALVEEYMDWLHQSPVPKLLFWGTPGVLIPPAEAARLAKSLPNCKAVDIGPGLNLLQEDNPDLIGSEIARWLSTLEISG

SEQ ID NO: 1593 - protein, 277 aa, Synthetic construct
MFHYVDVGPRDGTPVLFLHGNPTSSYVWRNIIPHVAPTHRCIAPDLIGMGKSDKPDLGYFFDDHVRFMTAFIEALGLEEVVLVIHDWGSALGFHWAKRNPERVKGIAFMEFIRPIPTWDEWPEFARETFQAFRTTDVGRKLIIDQNVFIEGTLPMGVVRPLTEVEMDHYREPFLNPVDREPLWRFPNELPIAGEPANIVALVEEYMDWLHQSPVPKLLFWGTPGVLIPPAEAARLAKSLPNCKAVDIGPGLNLLQEDNPDLIGSEIARWLSTLEISG

SEQ ID NO: 1594 - protein, 277 aa, Synthetic construct
MFHYVDVGPRDGTPVLFLHGNPTSSYVWRNIIPHVAPTHRCIAPDLIGMGKSDKPDLGYFFDDHVRFMSAFIEALGLEEVVLVIHDWGSALGFHWAKRNPERVKGIAFMEFIRPIPTWDEWPEFARETFQAFRTTDVGRKLIIDQNVFIEGTLPMGVVRPLTEVEMDHYREPFLNPVDREPLWRFPNELPIAGEPANIVALVEEYMDWLHQSPVPKLLFWGTPGVLIPPAEAARLAKSLPNCKAVDIGPGLNLLQEDNPDLIGSEIARWLSTLEISG

SEQ ID NO: 1595 - protein, 277 aa, Synthetic construct
MFHYVDVGPRDGTPVLFLHGNPTSSYVWRNIIPHVAPTHRCIAPDLIGMGKSDKPDLGYFFDDHVRFMAAFIEALGLEEVVLVIHDWGSALGFHWAKRNPERVKGIAFMEFIRPIPTWDEWPEFARETFQAFRTTDVGRKLIIDQNVFIEGTLPMGVVRPLTEVEMDHYREPFLNPVDREPLWRFPNELPIAGEPANIVALVEEYMDWLHQSPVPKLLFWGTPGVLIPPAEAARLAKSLPNCKAVDIGPGLNLLQEDNPDLIGSEIARWLSTLEISG

SEQ ID NO: 1596 - protein, 277 aa, Synthetic construct
MFHYVDVGPRDGTPVLFLHGNPTSSYVWRNIIPHVAPTHRCIAPDLIGMGKSDKPDLGYFFDDHVRFMDGFIEALGLEEVVLVIHDWGSALGFHWAKRNPERVKGIAFMEFIRPIPTWDEWPEFARETFQAFRTTDVGRKLIIDQNVFIEGTLPMGVVRPLTEVEMDHYREPFLNPVDREPLWRFPNELPIAGEPANIVALVEEYMDWLHQSPVPKLLFWGTPGVLIPPAEAARLAKSLPNCKAVDIGPGLNLLQEDNPDLIGSEIARWLSTLEISG

SEQ ID NO: 1597 - protein, 277 aa, Synthetic construct
MFHYVDVGPRDGTPVLFLHGNPTSSYVWRNIIPHVAPTHRCIAPDLIGMGKSDKPDLGYFFDDHVRFMDEFIEALGLEEVVLVIHDWGSALGFHWAKRNPERVKGIAFMEFIRPIPTWDEWPEFARETFQAFRTTDVGRKLIIDQNVFIEGTLPMGVVRPLTEVEMDHYREPFLNPVDREPLWRFPNELPIAGEPANIVALVEEYMDWLHQSPVPKLLFWGTPGVLIPPAEAARLAKSLPNCKAVDIGPGLNLLQEDNPDLIGSEIARWLSTLEISG

SEQ ID NO: 1598 - protein, 277 aa, Synthetic construct
MFHYVDVGPRDGTPVLFLHGNPTSSYVWRNIIPHVAPTHRCIAPDLIGMGKSDKPDLGYFFDDHVRFMDSFIEALGLEEVVLVIHDWGSALGFHWAKRNPERVKGIAFMEFIRPIPTWDEWPEFARETFQAFRTTDVGRKLIIDQNVFIEGTLPMGVVRPLTEVEMDHYREPFLNPVDREPLWRFPNELPIAGEPANIVALVEEYMDWLHQSPVPKLLFWGTPGVLIPPAEAARLAKSLPNCKAVDIGPGLNLLQEDNPDLIGSEIARWLSTLEISG

SEQ ID NO: 1599 - protein, 277 aa, Synthetic construct
MFHYVDVGPRDGTPVLFLHGNPTSSYVWRNIIPHVAPTHRCIAPDLIGMGKSDKPDLGYFFDDHVRFMDRFIEALGLEEVVLVIHDWGSALGFHWAKRNPERVKGIAFMEFIRPIPTWDEWPEFARETFQAFRTTDVGRKLIIDQNVFIEGTLPMGVVRPLTEVEMDHYREPFLNPVDREPLWRFPNELPIAGEPANIVALVEEYMDWLHQSPVPKLLFWGTPGVLIPPAEAARLAKSLPNCKAVDIGPGLNLLQEDNPDLIGSEIARWLSTLEISG

SEQ ID NO: 1600 - protein, 277 aa, Synthetic construct
MFHYVDVGPRDGTPVLFLHGNPTSSYVWRNIIPHVAPTHRCIAPDLIGMGKSDKPDLGYFFDDHVRFMDDFIEALGLEEVVLVIHDWGSALGFHWAKRNPERVKGIAFMEFIRPIPTWDEWPEFARETFQAFRTTDVGRKLIIDQNVFIEGTLPMGVVRPLTEVEMDHYREPFLNPVDREPLWRFPNELPIAGEPANIVALVEEYMDWLHQSPVPKLLFWGTPGVLIPPAEAARLAKSLPNCKAVDIGPGLNLLQEDNPDLIGSEIARWLSTLEISG

SEQ ID NO: 1601 - protein, 277 aa, Synthetic construct
MFHYVDVGPRDGTPVLFLHGNPTSSYVWRNIIPHVAPTHRCIAPDLIGMGKSDKPDLGYFFDDHVRFMDQFIEALGLEEVVLVIHDWGSALGFHWAKRNPERVKGIAFMEFIRPIPTWDEWPEFARETFQAFRTTDVGRKLIIDQNVFIEGTLPMGVVRPLTEVEMDHYREPFLNPVDREPLWRFPNELPIAGEPANIVALVEEYMDWLHQSPVPKLLFWGTPGVLIPPAEAARLAKSLPNCKAVDIGPGLNLLQEDNPDLIGSEIARWLSTLEISG

SEQ ID NO: 1602 - protein, 277 aa, Synthetic construct
MFHYVDVGPRDGTPVLFLHGNPTSSYVWRNIIPHVAPTHRCIAPDLIGMGKSDKPDLGYFFDDHVRFMDAWIEALGLEEVVLVIHDWGSALGFHWAKRNPERVKGIAFMEFIRPIPTWDEWPEFARETFQAFRTTDVGRKLIIDQNVFIEGTLPMGVVRPLTEVEMDHYREPFLNPVDREPLWRFPNELPIAGEPANIVALVEEYMDWLHQSPVPKLLFWGTPGVLIPPAEAARLAKSLPNCKAVDIGPGLNLLQEDNPDLIGSEIARWLSTLEISG

SEQ ID NO: 1603 - protein, 277 aa, Synthetic construct
MFHYVDVGPRDGTPVLFLHGNPTSSYVWRNIIPHVAPTHRCIAPDLIGMGKSDKPDLGYFFDDHVRFMDALIEALGLEEVVLVIHDWGSALGFHWAKRNPERVKGIAFMEFIRPIPTWDEWPEFARETFQAFRTTDVGRKLIIDQNVFIEGTLPMGVVRPLTEVEMDHYREPFLNPVDREPLWRFPNELPIAGEPANIVALVEEYMDWLHQSPVPKLLFWGTPGVLIPPAEAARLAKSLPNCKAVDIGPGLNLLQEDNPDLIGSEIARWLSTLEISG

SEQ ID NO: 1604 - protein, 277 aa, Synthetic construct
MFHYVDVGPRDGTPVLFLHGNPTSSYVWRNIIPHVAPTHRCIAPDLIGMGKSDKPDLGYFFDDHVRFMDAVIEALGLEEVVLVIHDWGSALGFHWAKRNPERVKGIAFMEFIRPIPTWDEWPEFARETFQAFRTTDVGRKLIIDQNVFIEGTLPMGVVRPLTEVEMDHYREPFLNPVDREPLWRFPNELPIAGEPANIVALVEEYMDWLHQSPVPKLLFWGTPGVLIPPAEAARLAKSLPNCKAVDIGPGLNLLQEDNPDLIGSEIARWLSTLEISG

SEQ ID NO: 1605 - protein, 277 aa, Synthetic construct
MFHYVDVGPRDGTPVLFLHGNPTSSYVWRNIIPHVAPTHRCIAPDLIGMGKSDKPDLGYFFDDHVRFMDAMIEALGLEEVVLVIHDWGSALGFHWAKRNPERVKGIAFMEFIRPIPTWDEWPEFARETFQAFRTTDVGRKLIIDQNVFIEGTLPMGVVRPLTEVEMDHYREPFLNPVDREPLWRFPNELPIAGEPANIVALVEEYMDWLHQSPVPKLLFWGTPGVLIPPAEAARLAKSLPNCKAVDIGPGLNLLQEDNPDLIGSEIARWLSTLEISG

SEQ ID NO: 1606 - protein, 277 aa, Synthetic construct
MFHYVDVGPRDGTPVLFLHGNPTSSYVWRNIIPHVAPTHRCIAPDLIGMGKSDKPDLGYFFDDHVRFMDAAIEALGLEEVVLVIHDWGSALGFHWAKRNPERVKGIAFMEFIRPIPTWDEWPEFARETFQAFRTTDVGRKLIIDQNVFIEGTLPMGVVRPLTEVEMDHYREPFLNPVDREPLWRFPNELPIAGEPANIVALVEEYMDWLHQSPVPKLLFWGTPGVLIPPAEAARLAKSLPNCKAVDIGPGLNLLQEDNPDLIGSEIARWLSTLEISG

SEQ ID NO: 1607 - protein, 277 aa, Synthetic construct
MFHYVDVGPRDGTPVLFLHGNPTSSYVWRNIIPHVAPTHRCIAPDLIGMGKSDKPDLGYFFDDHVRFMDAYIEALGLEEVVLVIHDWGSALGFHWAKRNPERVKGIAFMEFIRPIPTWDEWPEFARETFQAFRTTDVGRKLIIDQNVFIEGTLPMGVVRPLTEVEMDHYREPFLNPVDREPLWRFPNELPIAGEPANIVALVEEYMDWLHQSPVPKLLFWGTPGVLIPPAEAARLAKSLPNCKAVDIGPGLNLLQEDNPDLIGSEIARWLSTLEISG

SEQ ID NO: 1608 - protein, 277 aa, Synthetic construct
MFHYVDVGPRDGTPVLFLHGNPTSSYVWRNIIPHVAPTHRCIAPDLIGMGKSDKPDLGYFFDDHVRFMDAFVEALGLEEVVLVIHDWGSALGFHWAKRNPERVKGIAFMEFIRPIPTWDEWPEFARETFQAFRTTDVGRKLIIDQNVFIEGTLPMGVVRPLTEVEMDHYREPFLNPVDREPLWRFPNELPIAGEPANIVALVEEYMDWLHQSPVPKLLFWGTPGVLIPPAEAARLAKSLPNCKAVDIGPGLNLLQEDNPDLIGSEIARWLSTLEISG

SEQ ID NO: 1609 - protein, 277 aa, Synthetic construct
MFHYVDVGPRDGTPVLFLHGNPTSSYVWRNIIPHVAPTHRCIAPDLIGMGKSDKPDLGYFFDDHVRFMDAFFEALGLEEVVLVIHDWGSALGFHWAKRNPERVKGIAFMEFIRPIPTWDEWPEFARETFQAFRTTDVGRKLIIDQNVFIEGTLPMGVVRPLTEVEMDHYREPFLNPVDREPLWRFPNELPIAGEPANIVALVEEYMDWLHQSPVPKLLFWGTPGVLIPPAEAARLAKSLPNCKAVDIGPGLNLLQEDNPDLIGSEIARWLSTLEISG

SEQ ID NO: 1610 - protein, 277 aa, Synthetic construct
MFHYVDVGPRDGTPVLFLHGNPTSSYVWRNIIPHVAPTHRCIAPDLIGMGKSDKPDLGYFFDDHVRFMDAFLEALGLEEVVLVIHDWGSALGFHWAKRNPERVKGIAFMEFIRPIPTWDEWPEFARETFQAFRTTDVGRKLIIDQNVFIEGTLPMGVVRPLTEVEMDHYREPFLNPVDREPLWRFPNELPIAGEPANIVALVEEYMDWLHQSPVPKLLFWGTPGVLIPPAEAARLAKSLPNCKAVDIGPGLNLLQEDNPDLIGSEIARWLSTLEISG

SEQ ID NO: 1611 - protein, 277 aa, Synthetic construct
MFHYVDVGPRDGTPVLFLHGNPTSSYVWRNIIPHVAPTHRCIAPDLIGMGKSDKPDLGYFFDDHVRFMDAFTEALGLEEVVLVIHDWGSALGFHWAKRNPERVKGIAFMEFIRPIPTWDEWPEFARETFQAFRTTDVGRKLIIDQNVFIEGTLPMGVVRPLTEVEMDHYREPFLNPVDREPLWRFPNELPIAGEPANIVALVEEYMDWLHQSPVPKLLFWGTPGVLIPPAEAARLAKSLPNCKAVDIGPGLNLLQEDNPDLIGSEIARWLSTLEISG

SEQ ID NO: 1612 - protein, 277 aa, Synthetic construct
MFHYVDVGPRDGTPVLFLHGNPTSSYVWRNIIPHVAPTHRCIAPDLIGMGKSDKPDLGYFFDDHVRFMDAFAEALGLEEVVLVIHDWGSALGFHWAKRNPERVKGIAFMEFIRPIPTWDEWPEFARETFQAFRTTDVGRKLIIDQNVFIEGTLPMGVVRPLTEVEMDHYREPFLNPVDREPLWRFPNELPIAGEPANIVALVEEYMDWLHQSPVPKLLFWGTPGVLIPPAEAARLAKSLPNCKAVDIGPGLNLLQEDNPDLIGSEIARWLSTLEISG

SEQ ID NO: 1613 - protein, 277 aa, Synthetic construct
MFHYVDVGPRDGTPVLFLHGNPTSSYVWRNIIPHVAPTHRCIAPDLIGMGKSDKPDLGYFFDDHVRFMDAFMEALGLEEVVLVIHDWGSALGFHWAKRNPERVKGIAFMEFIRPIPTWDEWPEFARETFQAFRTTDVGRKLIIDQNVFIEGTLPMGVVRPLTEVEMDHYREPFLNPVDREPLWRFPNELPIAGEPANIVALVEEYMDWLHQSPVPKLLFWGTPGVLIPPAEAARLAKSLPNCKAVDIGPGLNLLQEDNPDLIGSEIARWLSTLEISG

SEQ ID NO: 1614 - protein, 277 aa, Synthetic construct
MFHYVDVGPRDGTPVLFLHGNPTSSYVWRNIIPHVAPTHRCIAPDLIGMGKSDKPDLGYFFDDHVRFMDAFIDALGLEEVVLVIHDWGSALGFHWAKRNPERVKGIAFMEFIRPIPTWDEWPEFARETFQAFRTTDVGRKLIIDQNVFIEGTLPMGVVRPLTEVEMDHYREPFLNPVDREPLWRFPNELPIAGEPANIVALVEEYMDWLHQSPVPKLLFWGTPGVLIPPAEAARLAKSLPNCKAVDIGPGLNLLQEDNPDLIGSEIARWLSTLEISG

SEQ ID NO: 1615 - protein, 277 aa, Synthetic construct
MFHYVDVGPRDGTPVLFLHGNPTSSYVWRNIIPHVAPTHRCIAPDLIGMGKSDKPDLGYFFDDHVRFMDAFIAALGLEEVVLVIHDWGSALGFHWAKRNPERVKGIAFMEFIRPIPTWDEWPEFARETFQAFRTTDVGRKLIIDQNVFIEGTLPMGVVRPLTEVEMDHYREPFLNPVDREPLWRFPNELPIAGEPANIVALVEEYMDWLHQSPVPKLLFWGTPGVLIPPAEAARLAKSLPNCKAVDIGPGLNLLQEDNPDLIGSEIARWLSTLEISG

SEQ ID NO: 1616 - protein, 277 aa, Synthetic construct
MFHYVDVGPRDGTPVLFLHGNPTSSYVWRNIIPHVAPTHRCIAPDLIGMGKSDKPDLGYFFDDHVRFMDAFITALGLEEVVLVIHDWGSALGFHWAKRNPERVKGIAFMEFIRPIPTWDEWPEFARETFQAFRTTDVGRKLIIDQNVFIEGTLPMGVVRPLTEVEMDHYREPFLNPVDREPLWRFPNELPIAGEPANIVALVEEYMDWLHQSPVPKLLFWGTPGVLIPPAEAARLAKSLPNCKAVDIGPGLNLLQEDNPDLIGSEIARWLSTLEISG

SEQ ID NO: 1617 - protein, 277 aa, Synthetic construct
MFHYVDVGPRDGTPVLFLHGNPTSSYVWRNIIPHVAPTHRCIAPDLIGMGKSDKPDLGYFFDDHVRFMDAFISALGLEEVVLVIHDWGSALGFHWAKRNPERVKGIAFMEFIRPIPTWDEWPEFARETFQAFRTTDVGRKLIIDQNVFIEGTLPMGVVRPLTEVEMDHYREPFLNPVDREPLWRFPNELPIAGEPANIVALVEEYMDWLHQSPVPKLLFWGTPGVLIPPAEAARLAKSLPNCKAVDIGPGLNLLQEDNPDLIGSEIARWLSTLEISG

SEQ ID NO: 1618 - protein, 277 aa, Synthetic construct
MFHYVDVGPRDGTPVLFLHGNPTSSYVWRNIIPHVAPTHRCIAPDLIGMGKSDKPDLGYFFDDHVRFMDAFIQALGLEEVVLVIHDWGSALGFHWAKRNPERVKGIAFMEFIRPIPTWDEWPEFARETFQAFRTTDVGRKLIIDQNVFIEGTLPMGVVRPLTEVEMDHYREPFLNPVDREPLWRFPNELPIAGEPANIVALVEEYMDWLHQSPVPKLLFWGTPGVLIPPAEAARLAKSLPNCKAVDIGPGLNLLQEDNPDLIGSEIARWLSTLEISG

SEQ ID NO: 1619 - protein, 277 aa, Synthetic construct
MFHYVDVGPRDGTPVLFLHGNPTSSYVWRNIIPHVAPTHRCIAPDLIGMGKSDKPDLGYFFDDHVRFMDAFIGALGLEEVVLVIHDWGSALGFHWAKRNPERVKGIAFMEFIRPIPTWDEWPEFARETFQAFRTTDVGRKLIIDQNVFIEGTLPMGVVRPLTEVEMDHYREPFLNPVDREPLWRFPNELPIAGEPANIVALVEEYMDWLHQSPVPKLLFWGTPGVLIPPAEAARLAKSLPNCKAVDIGPGLNLLQEDNPDLIGSEIARWLSTLEISG

SEQ ID NO: 1620 - protein, 277 aa, Synthetic construct
MFHYVDVGPRDGTPVLFLHGNPTSSYVWRNIIPHVAPTHRCIAPDLIGMGKSDKPDLGYFFDDHVRFMDAFIEELGLEEVVLVIHDWGSALGFHWAKRNPERVKGIAFMEFIRPIPTWDEWPEFARETFQAFRTTDVGRKLIIDQNVFIEGTLPMGVVRPLTEVEMDHYREPFLNPVDREPLWRFPNELPIAGEPANIVALVEEYMDWLHQSPVPKLLFWGTPGVLIPPAEAARLAKSLPNCKAVDIGPGLNLLQEDNPDLIGSEIARWLSTLEISG

SEQ ID NO: 1621 - protein, 277 aa, Synthetic construct
MFHYVDVGPRDGTPVLFLHGNPTSSYVWRNIIPHVAPTHRCIAPDLIGMGKSDKPDLGYFFDDHVRFMDAFIEKLGLEEVVLVIHDWGSALGFHWAKRNPERVKGIAFMEFIRPIPTWDEWPEFARETFQAFRTTDVGRKLIIDQNVFIEGTLPMGVVRPLTEVEMDHYREPFLNPVDREPLWRFPNELPIAGEPANIVALVEEYMDWLHQSPVPKLLFWGTPGVLIPPAEAARLAKSLPNCKAVDIGPGLNLLQEDNPDLIGSEIARWLSTLEISG

SEQ ID NO: 1622 - protein, 277 aa, Synthetic construct
MFHYVDVGPRDGTPVLFLHGNPTSSYVWRNIIPHVAPTHRCIAPDLIGMGKSDKPDLGYFFDDHVRFMDAFIEQLGLEEVVLVIHDWGSALGFHWAKRNPERVKGIAFMEFIRPIPTWDEWPEFARETFQAFRTTDVGRKLIIDQNVFIEGTLPMGVVRPLTEVEMDHYREPFLNPVDREPLWRFPNELPIAGEPANIVALVEEYMDWLHQSPVPKLLFWGTPGVLIPPAEAARLAKSLPNCKAVDIGPGLNLLQEDNPDLIGSEIARWLSTLEISG

SEQ ID NO: 1623 - protein, 277 aa, Synthetic construct
MFHYVDVGPRDGTPVLFLHGNPTSSYVWRNIIPHVAPTHRCIAPDLIGMGKSDKPDLGYFFDDHVRFMDAFIERLGLEEVVLVIHDWGSALGFHWAKRNPERVKGIAFMEFIRPIPTWDEWPEFARETFQAFRTTDVGRKLIIDQNVFIEGTLPMGVVRPLTEVEMDHYREPFLNPVDREPLWRFPNELPIAGEPANIVALVEEYMDWLHQSPVPKLLFWGTPGVLIPPAEAARLAKSLPNCKAVDIGPGLNLLQEDNPDLIGSEIARWLSTLEISG

SEQ ID NO: 1624 - protein, 277 aa, Synthetic construct
MFHYVDVGPRDGTPVLFLHGNPTSSYVWRNIIPHVAPTHRCIAPDLIGMGKSDKPDLGYFFDDHVRFMDAFIETLGLEEVVLVIHDWGSALGFHWAKRNPERVKGIAFMEFIRPIPTWDEWPEFARETFQAFRTTDVGRKLIIDQNVFIEGTLPMGVVRPLTEVEMDHYREPFLNPVDREPLWRFPNELPIAGEPANIVALVEEYMDWLHQSPVPKLLFWGTPGVLIPPAEAARLAKSLPNCKAVDIGPGLNLLQEDNPDLIGSEIARWLSTLEISG

SEQ ID NO: 1625 - protein, 277 aa, Synthetic construct
MFHYVDVGPRDGTPVLFLHGNPTSSYVWRNIIPHVAPTHRCIAPDLIGMGKSDKPDLGYFFDDHVRFMDAFIEHLGLEEVVLVIHDWGSALGFHWAKRNPERVKGIAFMEFIRPIPTWDEWPEFARETFQAFRTTDVGRKLIIDQNVFIEGTLPMGVVRPLTEVEMDHYREPFLNPVDREPLWRFPNELPIAGEPANIVALVEEYMDWLHQSPVPKLLFWGTPGVLIPPAEAARLAKSLPNCKAVDIGPGLNLLQEDNPDLIGSEIARWLSTLEISG

SEQ ID NO: 1626 - protein, 277 aa, Synthetic construct
MFHYVDVGPRDGTPVLFLHGNPTSSYVWRNIIPHVAPTHRCIAPDLIGMGKSDKPDLGYFFDDHVRFMDAFIEAIGLEEVVLVIHDWGSALGFHWAKRNPERVKGIAFMEFIRPIPTWDEWPEFARETFQAFRTTDVGRKLIIDQNVFIEGTLPMGVVRPLTEVEMDHYREPFLNPVDREPLWRFPNELPIAGEPANIVALVEEYMDWLHQSPVPKLLFWGTPGVLIPPAEAARLAKSLPNCKAVDIGPGLNLLQEDNPDLIGSEIARWLSTLEISG

SEQ ID NO: 1627 - protein, 277 aa, Synthetic construct
MFHYVDVGPRDGTPVLFLHGNPTSSYVWRNIIPHVAPTHRCIAPDLIGMGKSDKPDLGYFFDDHVRFMDAFIEAMGLEEVVLVIHDWGSALGFHWAKRNPERVKGIAFMEFIRPIPTWDEWPEFARETFQAFRTTDVGRKLIIDQNVFIEGTLPMGVVRPLTEVEMDHYREPFLNPVDREPLWRFPNELPIAGEPANIVALVEEYMDWLHQSPVPKLLFWGTPGVLIPPAEAARLAKSLPNCKAVDIGPGLNLLQEDNPDLIGSEIARWLSTLEISG

SEQ ID NO: 1628 - protein, 277 aa, Synthetic construct
MFHYVDVGPRDGTPVLFLHGNPTSSYVWRNIIPHVAPTHRCIAPDLIGMGKSDKPDLGYFFDDHVRFMDAFIEAVGLEEVVLVIHDWGSALGFHWAKRNPERVKGIAFMEFIRPIPTWDEWPEFARETFQAFRTTDVGRKLIIDQNVFIEGTLPMGVVRPLTEVEMDHYREPFLNPVDREPLWRFPNELPIAGEPANIVALVEEYMDWLHQSPVPKLLFWGTPGVLIPPAEAARLAKSLPNCKAVDIGPGLNLLQEDNPDLIGSEIARWLSTLEISG

SEQ ID NO: 1629 - protein, 277 aa, Synthetic construct
MFHYVDVGPRDGTPVLFLHGNPTSSYVWRNIIPHVAPTHRCIAPDLIGMGKSDKPDLGYFFDDHVRFMDAFIEAAGLEEVVLVIHDWGSALGFHWAKRNPERVKGIAFMEFIRPIPTWDEWPEFARETFQAFRTTDVGRKLIIDQNVFIEGTLPMGVVRPLTEVEMDHYREPFLNPVDREPLWRFPNELPIAGEPANIVALVEEYMDWLHQSPVPKLLFWGTPGVLIPPAEAARLAKSLPNCKAVDIGPGLNLLQEDNPDLIGSEIARWLSTLEISG

SEQ ID NO: 1630 - protein, 277 aa, Synthetic construct
MFHYVDVGPRDGTPVLFLHGNPTSSYVWRNIIPHVAPTHRCIAPDLIGMGKSDKPDLGYFFDDHVRFMDAFIEAQGLEEVVLVIHDWGSALGFHWAKRNPERVKGIAFMEFIRPIPTWDEWPEFARETFQAFRTTDVGRKLIIDQNVFIEGTLPMGVVRPLTEVEMDHYREPFLNPVDREPLWRFPNELPIAGEPANIVALVEEYMDWLHQSPVPKLLFWGTPGVLIPPAEAARLAKSLPNCKAVDIGPGLNLLQEDNPDLIGSEIARWLSTLEISG

SEQ ID NO: 1631 - protein, 277 aa, Synthetic construct
MFHYVDVGPRDGTPVLFLHGNPTSSYVWRNIIPHVAPTHRCIAPDLIGMGKSDKPDLGYFFDDHVRFMDAFIEATGLEEVVLVIHDWGSALGFHWAKRNPERVKGIAFMEFIRPIPTWDEWPEFARETFQAFRTTDVGRKLIIDQNVFIEGTLPMGVVRPLTEVEMDHYREPFLNPVDREPLWRFPNELPIAGEPANIVALVEEYMDWLHQSPVPKLLFWGTPGVLIPPAEAARLAKSLPNCKAVDIGPGLNLLQEDNPDLIGSEIARWLSTLEISG

SEQ ID NO: 1632 - protein, 277 aa, Synthetic construct
MFHYVDVGPRDGTPVLFLHGNPTSSYVWRNIIPHVAPTHRCIAPDLIGMGKSDKPDLGYFFDDHVRFMDAFIEALDLEEVVLVIHDWGSALGFHWAKRNPERVKGIAFMEFIRPIPTWDEWPEFARETFQAFRTTDVGRKLIIDQNVFIEGTLPMGVVRPLTEVEMDHYREPFLNPVDREPLWRFPNELPIAGEPANIVALVEEYMDWLHQSPVPKLLFWGTPGVLIPPAEAARLAKSLPNCKAVDIGPGLNLLQEDNPDLIGSEIARWLSTLEISG

SEQ ID NO: 1633 - protein, 277 aa, Synthetic construct
MFHYVDVGPRDGTPVLFLHGNPTSSYVWRNIIPHVAPTHRCIAPDLIGMGKSDKPDLGYFFDDHVRFMDAFIEALELEEVVLVIHDWGSALGFHWAKRNPERVKGIAFMEFIRPIPTWDEWPEFARETFQAFRTTDVGRKLIIDQNVFIEGTLPMGVVRPLTEVEMDHYREPFLNPVDREPLWRFPNELPIAGEPANIVALVEEYMDWLHQSPVPKLLFWGTPGVLIPPAEAARLAKSLPNCKAVDIGPGLNLLQEDNPDLIGSEIARWLSTLEISG

SEQ ID NO: 1634 - protein, 277 aa, Synthetic construct
MFHYVDVGPRDGTPVLFLHGNPTSSYVWRNIIPHVAPTHRCIAPDLIGMGKSDKPDLGYFFDDHVRFMDAFIEALNLEEVVLVIHDWGSALGFHWAKRNPERVKGIAFMEFIRPIPTWDEWPEFARETFQAFRTTDVGRKLIIDQNVFIEGTLPMGVVRPLTEVEMDHYREPFLNPVDREPLWRFPNELPIAGEPANIVALVEEYMDWLHQSPVPKLLFWGTPGVLIPPAEAARLAKSLPNCKAVDIGPGLNLLQEDNPDLIGSEIARWLSTLEISG

SEQ ID NO: 1635 - protein, 277 aa, Synthetic construct
MFHYVDVGPRDGTPVLFLHGNPTSSYVWRNIIPHVAPTHRCIAPDLIGMGKSDKPDLGYFFDDHVRFMDAFIEALKLEEVVLVIHDWGSALGFHWAKRNPERVKGIAFMEFIRPIPTWDEWPEFARETFQAFRTTDVGRKLIIDQNVFIEGTLPMGVVRPLTEVEMDHYREPFLNPVDREPLWRFPNELPIAGEPANIVALVEEYMDWLHQSPVPKLLFWGTPGVLIPPAEAARLAKSLPNCKAVDIGPGLNLLQEDNPDLIGSEIARWLSTLEISG

SEQ ID NO: 1636 - protein, 277 aa, Synthetic construct
MFHYVDVGPRDGTPVLFLHGNPTSSYVWRNIIPHVAPTHRCIAPDLIGMGKSDKPDLGYFFDDHVRFMDAFIEALALEEVVLVIHDWGSALGFHWAKRNPERVKGIAFMEFIRPIPTWDEWPEFARETFQAFRTTDVGRKLIIDQNVFIEGTLPMGVVRPLTEVEMDHYREPFLNPVDREPLWRFPNELPIAGEPANIVALVEEYMDWLHQSPVPKLLFWGTPGVLIPPAEAARLAKSLPNCKAVDIGPGLNLLQEDNPDLIGSEIARWLSTLEISG

SEQ ID NO: 1637 - protein, 277 aa, Synthetic construct
MFHYVDVGPRDGTPVLFLHGNPTSSYVWRNIIPHVAPTHRCIAPDLIGMGKSDKPDLGYFFDDHVRFMDAFIEALQLEEVVLVIHDWGSALGFHWAKRNPERVKGIAFMEFIRPIPTWDEWPEFARETFQAFRTTDVGRKLIIDQNVFIEGTLPMGVVRPLTEVEMDHYREPFLNPVDREPLWRFPNELPIAGEPANIVALVEEYMDWLHQSPVPKLLFWGTPGVLIPPAEAARLAKSLPNCKAVDIGPGLNLLQEDNPDLIGSEIARWLSTLEISG

SEQ ID NO: 1638 - protein, 277 aa, Synthetic construct
MFHYVDVGPRDGTPVLFLHGNPTSSYVWRNIIPHVAPTHRCIAPDLIGMGKSDKPDLGYFFDDHVRFMDAFIEALGIEEVVLVIHDWGSALGFHWAKRNPERVKGIAFMEFIRPIPTWDEWPEFARETFQAFRTTDVGRKLIIDQNVFIEGTLPMGVVRPLTEVEMDHYREPFLNPVDREPLWRFPNELPIAGEPANIVALVEEYMDWLHQSPVPKLLFWGTPGVLIPPAEAARLAKSLPNCKAVDIGPGLNLLQEDNPDLIGSEIARWLSTLEISG

SEQ ID NO: 1639 - protein, 277 aa, Synthetic construct
MFHYVDVGPRDGTPVLFLHGNPTSSYVWRNIIPHVAPTHRCIAPDLIGMGKSDKPDLGYFFDDHVRFMDAFIEALGVEEVVLVIHDWGSALGFHWAKRNPERVKGIAFMEFIRPIPTWDEWPEFARETFQAFRTTDVGRKLIIDQNVFIEGTLPMGVVRPLTEVEMDHYREPFLNPVDREPLWRFPNELPIAGEPANIVALVEEYMDWLHQSPVPKLLFWGTPGVLIPPAEAARLAKSLPNCKAVDIGPGLNLLQEDNPDLIGSEIARWLSTLEISG

SEQ ID NO: 1640 - protein, 277 aa, Synthetic construct
MFHYVDVGPRDGTPVLFLHGNPTSSYVWRNIIPHVAPTHRCIAPDLIGMGKSDKPDLGYFFDDHVRFMDAFIEALGFEEVVLVIHDWGSALGFHWAKRNPERVKGIAFMEFIRPIPTWDEWPEFARETFQAFRTTDVGRKLIIDQNVFIEGTLPMGVVRPLTEVEMDHYREPFLNPVDREPLWRFPNELPIAGEPANIVALVEEYMDWLHQSPVPKLLFWGTPGVLIPPAEAARLAKSLPNCKAVDIGPGLNLLQEDNPDLIGSEIARWLSTLEISG

SEQ ID NO: 1641 - protein, 277 aa, Synthetic construct
MFHYVDVGPRDGTPVLFLHGNPTSSYVWRNIIPHVAPTHRCIAPDLIGMGKSDKPDLGYFFDDHVRFMDAFIEALGMEEVVLVIHDWGSALGFHWAKRNPERVKGIAFMEFIRPIPTWDEWPEFARETFQAFRTTDVGRKLIIDQNVFIEGTLPMGVVRPLTEVEMDHYREPFLNPVDREPLWRFPNELPIAGEPANIVALVEEYMDWLHQSPVPKLLFWGTPGVLIPPAEAARLAKSLPNCKAVDIGPGLNLLQEDNPDLIGSEIARWLSTLEISG

SEQ ID NO: 1642 - protein, 277 aa, Synthetic construct
MFHYVDVGPRDGTPVLFLHGNPTSSYVWRNIIPHVAPTHRCIAPDLIGMGKSDKPDLGYFFDDHVRFMDAFIEALGAEEVVLVIHDWGSALGFHWAKRNPERVKGIAFMEFIRPIPTWDEWPEFARETFQAFRTTDVGRKLIIDQNVFIEGTLPMGVVRPLTEVEMDHYREPFLNPVDREPLWRFPNELPIAGEPANIVALVEEYMDWLHQSPVPKLLFWGTPGVLIPPAEAARLAKSLPNCKAVDIGPGLNLLQEDNPDLIGSEIARWLSTLEISG

SEQ ID NO: 1643 - protein, 277 aa, Synthetic construct
MFHYVDVGPRDGTPVLFLHGNPTSSYVWRNIIPHVAPTHRCIAPDLIGMGKSDKPDLGYFFDDHVRFMDAFIEALGCEEVVLVIHDWGSALGFHWAKRNPERVKGIAFMEFIRPIPTWDEWPEFARETFQAFRTTDVGRKLIIDQNVFIEGTLPMGVVRPLTEVEMDHYREPFLNPVDREPLWRFPNELPIAGEPANIVALVEEYMDWLHQSPVPKLLFWGTPGVLIPPAEAARLAKSLPNCKAVDIGPGLNLLQEDNPDLIGSEIARWLSTLEISG

SEQ ID NO: 1644 - protein, 277 aa, Synthetic construct
MFHYVDVGPRDGTPVLFLHGNPTSSYVWRNIIPHVAPTHRCIAPDLIGMGKSDKPDLGYFFDDHVRFMDAFIEALGLDEVVLVIHDWGSALGFHWAKRNPERVKGIAFMEFIRPIPTWDEWPEFARETFQAFRTTDVGRKLIIDQNVFIEGTLPMGVVRPLTEVEMDHYREPFLNPVDREPLWRFPNELPIAGEPANIVALVEEYMDWLHQSPVPKLLFWGTPGVLIPPAEAARLAKSLPNCKAVDIGPGLNLLQEDNPDLIGSEIARWLSTLEISG

SEQ ID NO: 1645 - protein, 277 aa, Synthetic construct
MFHYVDVGPRDGTPVLFLHGNPTSSYVWRNIIPHVAPTHRCIAPDLIGMGKSDKPDLGYFFDDHVRFMDAFIEALGLKEVVLVIHDWGSALGFHWAKRNPERVKGIAFMEFIRPIPTWDEWPEFARETFQAFRTTDVGRKLIIDQNVFIEGTLPMGVVRPLTEVEMDHYREPFLNPVDREPLWRFPNELPIAGEPANIVALVEEYMDWLHQSPVPKLLFWGTPGVLIPPAEAARLAKSLPNCKAVDIGPGLNLLQEDNPDLIGSEIARWLSTLEISG

SEQ ID NO: 1646 - protein, 277 aa, Synthetic construct
MFHYVDVGPRDGTPVLFLHGNPTSSYVWRNIIPHVAPTHRCIAPDLIGMGKSDKPDLGYFFDDHVRFMDAFIEALGLTEVVLVIHDWGSALGFHWAKRNPERVKGIAFMEFIRPIPTWDEWPEFARETFQAFRTTDVGRKLIIDQNVFIEGTLPMGVVRPLTEVEMDHYREPFLNPVDREPLWRFPNELPIAGEPANIVALVEEYMDWLHQSPVPKLLFWGTPGVLIPPAEAARLAKSLPNCKAVDIGPGLNLLQEDNPDLIGSEIARWLSTLEISG

SEQ ID NO: 1647 - protein, 277 aa, Synthetic construct
MFHYVDVGPRDGTPVLFLHGNPTSSYVWRNIIPHVAPTHRCIAPDLIGMGKSDKPDLGYFFDDHVRFMDAFIEALGLSEVVLVIHDWGSALGFHWAKRNPERVKGIAFMEFIRPIPTWDEWPEFARETFQAFRTTDVGRKLIIDQNVFIEGTLPMGVVRPLTEVEMDHYREPFLNPVDREPLWRFPNELPIAGEPANIVALVEEYMDWLHQSPVPKLLFWGTPGVLIPPAEAARLAKSLPNCKAVDIGPGLNLLQEDNPDLIGSEIARWLSTLEISG

SEQ ID NO: 1648 - protein, 277 aa, Synthetic construct
MFHYVDVGPRDGTPVLFLHGNPTSSYVWRNIIPHVAPTHRCIAPDLIGMGKSDKPDLGYFFDDHVRFMDAFIEALGLREVVLVIHDWGSALGFHWAKRNPERVKGIAFMEFIRPIPTWDEWPEFARETFQAFRTTDVGRKLIIDQNVFIEGTLPMGVVRPLTEVEMDHYREPFLNPVDREPLWRFPNELPIAGEPANIVALVEEYMDWLHQSPVPKLLFWGTPGVLIPPAEAARLAKSLPNCKAVDIGPGLNLLQEDNPDLIGSEIARWLSTLEISG

SEQ ID NO: 1649 - protein, 277 aa, Synthetic construct
MFHYVDVGPRDGTPVLFLHGNPTSSYVWRNIIPHVAPTHRCIAPDLIGMGKSDKPDLGYFFDDHVRFMDAFIEALGLNEVVLVIHDWGSALGFHWAKRNPERVKGIAFMEFIRPIPTWDEWPEFARETFQAFRTTDVGRKLIIDQNVFIEGTLPMGVVRPLTEVEMDHYREPFLNPVDREPLWRFPNELPIAGEPANIVALVEEYMDWLHQSPVPKLLFWGTPGVLIPPAEAARLAKSLPNCKAVDIGPGLNLLQEDNPDLIGSEIARWLSTLEISG

SEQ ID NO: 1650 - protein, 277 aa, Synthetic construct
MFHYVDVGPRDGTPVLFLHGNPTSSYVWRNIIPHVAPTHRCIAPDLIGMGKSDKPDLGYFFDDHVRFMDAFIEALGLENVVLVIHDWGSALGFHWAKRNPERVKGIAFMEFIRPIPTWDEWPEFARETFQAFRTTDVGRKLIIDQNVFIEGTLPMGVVRPLTEVEMDHYREPFLNPVDREPLWRFPNELPIAGEPANIVALVEEYMDWLHQSPVPKLLFWGTPGVLIPPAEAARLAKSLPNCKAVDIGPGLNLLQEDNPDLIGSEIARWLSTLEISG

SEQ ID NO: 1651 - protein, 277 aa, Synthetic construct
MFHYVDVGPRDGTPVLFLHGNPTSSYVWRNIIPHVAPTHRCIAPDLIGMGKSDKPDLGYFFDDHVRFMDAFIEALGLERVVLVIHDWGSALGFHWAKRNPERVKGIAFMEFIRPIPTWDEWPEFARETFQAFRTTDVGRKLIIDQNVFIEGTLPMGVVRPLTEVEMDHYREPFLNPVDREPLWRFPNELPIAGEPANIVALVEEYMDWLHQSPVPKLLFWGTPGVLIPPAEAARLAKSLPNCKAVDIGPGLNLLQEDNPDLIGSEIARWLSTLEISG

SEQ ID NO: 1652 - protein, 277 aa, Synthetic construct
MFHYVDVGPRDGTPVLFLHGNPTSSYVWRNIIPHVAPTHRCIAPDLIGMGKSDKPDLGYFFDDHVRFMDAFIEALGLEDVVLVIHDWGSALGFHWAKRNPERVKGIAFMEFIRPIPTWDEWPEFARETFQAFRTTDVGRKLIIDQNVFIEGTLPMGVVRPLTEVEMDHYREPFLNPVDREPLWRFPNELPIAGEPANIVALVEEYMDWLHQSPVPKLLFWGTPGVLIPPAEAARLAKSLPNCKAVDIGPGLNLLQEDNPDLIGSEIARWLSTLEISG

SEQ ID NO: 1653 - protein, 277 aa, Synthetic construct
MFHYVDVGPRDGTPVLFLHGNPTSSYVWRNIIPHVAPTHRCIAPDLIGMGKSDKPDLGYFFDDHVRFMDAFIEALGLEKVVLVIHDWGSALGFHWAKRNPERVKGIAFMEFIRPIPTWDEWPEFARETFQAFRTTDVGRKLIIDQNVFIEGTLPMGVVRPLTEVEMDHYREPFLNPVDREPLWRFPNELPIAGEPANIVALVEEYMDWLHQSPVPKLLFWGTPGVLIPPAEAARLAKSLPNCKAVDIGPGLNLLQEDNPDLIGSEIARWLSTLEISG

SEQ ID NO: 1654 - protein, 277 aa, Synthetic construct
MFHYVDVGPRDGTPVLFLHGNPTSSYVWRNIIPHVAPTHRCIAPDLIGMGKSDKPDLGYFFDDHVRFMDAFIEALGLEQVVLVIHDWGSALGFHWAKRNPERVKGIAFMEFIRPIPTWDEWPEFARETFQAFRTTDVGRKLIIDQNVFIEGTLPMGVVRPLTEVEMDHYREPFLNPVDREPLWRFPNELPIAGEPANIVALVEEYMDWLHQSPVPKLLFWGTPGVLIPPAEAARLAKSLPNCKAVDIGPGLNLLQEDNPDLIGSEIARWLSTLEISG

SEQ ID NO: 1655 - protein, 277 aa, Synthetic construct
MFHYVDVGPRDGTPVLFLHGNPTSSYVWRNIIPHVAPTHRCIAPDLIGMGKSDKPDLGYFFDDHVRFMDAFIEALGLESVVLVIHDWGSALGFHWAKRNPERVKGIAFMEFIRPIPTWDEWPEFARETFQAFRTTDVGRKLIIDQNVFIEGTLPMGVVRPLTEVEMDHYREPFLNPVDREPLWRFPNELPIAGEPANIVALVEEYMDWLHQSPVPKLLFWGTPGVLIPPAEAARLAKSLPNCKAVDIGPGLNLLQEDNPDLIGSEIARWLSTLEISG

SEQ ID NO: 1656 - protein, 277 aa, Synthetic construct
MFHYVDVGPRDGTPVLFLHGNPTSSYVWRNIIPHVAPTHRCIAPDLIGMGKSDKPDLGYFFDDHVRFMDAFIEALGLEEIVLVIHDWGSALGFHWAKRNPERVKGIAFMEFIRPIPTWDEWPEFARETFQAFRTTDVGRKLIIDQNVFIEGTLPMGVVRPLTEVEMDHYREPFLNPVDREPLWRFPNELPIAGEPANIVALVEEYMDWLHQSPVPKLLFWGTPGVLIPPAEAARLAKSLPNCKAVDIGPGLNLLQEDNPDLIGSEIARWLSTLEISG

SEQ ID NO: 1657 - protein, 277 aa, Synthetic construct
MFHYVDVGPRDGTPVLFLHGNPTSSYVWRNIIPHVAPTHRCIAPDLIGMGKSDKPDLGYFFDDHVRFMDAFIEALGLEELVLVIHDWGSALGFHWAKRNPERVKGIAFMEFIRPIPTWDEWPEFARETFQAFRTTDVGRKLIIDQNVFIEGTLPMGVVRPLTEVEMDHYREPFLNPVDREPLWRFPNELPIAGEPANIVALVEEYMDWLHQSPVPKLLFWGTPGVLIPPAEAARLAKSLPNCKAVDIGPGLNLLQEDNPDLIGSEIARWLSTLEISG

SEQ ID NO: 1658 - protein, 277 aa, Synthetic construct
MFHYVDVGPRDGTPVLFLHGNPTSSYVWRNIIPHVAPTHRCIAPDLIGMGKSDKPDLGYFFDDHVRFMDAFIEALGLEEAVLVIHDWGSALGFHWAKRNPERVKGIAFMEFIRPIPTWDEWPEFARETFQAFRTTDVGRKLIIDQNVFIEGTLPMGVVRPLTEVEMDHYREPFLNPVDREPLWRFPNELPIAGEPANIVALVEEYMDWLHQSPVPKLLFWGTPGVLIPPAEAARLAKSLPNCKAVDIGPGLNLLQEDNPDLIGSEIARWLSTLEISG

SEQ ID NO: 1659 - protein, 277 aa, Synthetic construct
MFHYVDVGPRDGTPVLFLHGNPTSSYVWRNIIPHVAPTHRCIAPDLIGMGKSDKPDLGYFFDDHVRFMDAFIEALGLEEMVLVIHDWGSALGFHWAKRNPERVKGIAFMEFIRPIPTWDEWPEFARETFQAFRTTDVGRKLIIDQNVFIEGTLPMGVVRPLTEVEMDHYREPFLNPVDREPLWRFPNELPIAGEPANIVALVEEYMDWLHQSPVPKLLFWGTPGVLIPPAEAARLAKSLPNCKAVDIGPGLNLLQEDNPDLIGSEIARWLSTLEISG

SEQ ID NO: 1660 - protein, 277 aa, Synthetic construct
MFHYVDVGPRDGTPVLFLHGNPTSSYVWRNIIPHVAPTHRCIAPDLIGMGKSDKPDLGYFFDDHVRFMDAFIEALGLEETVLVIHDWGSALGFHWAKRNPERVKGIAFMEFIRPIPTWDEWPEFARETFQAFRTTDVGRKLIIDQNVFIEGTLPMGVVRPLTEVEMDHYREPFLNPVDREPLWRFPNELPIAGEPANIVALVEEYMDWLHQSPVPKLLFWGTPGVLIPPAEAARLAKSLPNCKAVDIGPGLNLLQEDNPDLIGSEIARWLSTLEISG

SEQ ID NO: 1661 - protein, 277 aa, Synthetic construct
MFHYVDVGPRDGTPVLFLHGNPTSSYVWRNIIPHVAPTHRCIAPDLIGMGKSDKPDLGYFFDDHVRFMDAFIEALGLEEFVLVIHDWGSALGFHWAKRNPERVKGIAFMEFIRPIPTWDEWPEFARETFQAFRTTDVGRKLIIDQNVFIEGTLPMGVVRPLTEVEMDHYREPFLNPVDREPLWRFPNELPIAGEPANIVALVEEYMDWLHQSPVPKLLFWGTPGVLIPPAEAARLAKSLPNCKAVDIGPGLNLLQEDNPDLIGSEIARWLSTLEISG

SEQ ID NO: 1662 - protein, 277 aa, Synthetic construct
MFHYVDVGPRDGTPVLFLHGNPTSSYVWRNIIPHVAPTHRCIAPDLIGMGKSDKPDLGYFFDDHVRFMDAFIEALGLEEVTLVIHDWGSALGFHWAKRNPERVKGIAFMEFIRPIPTWDEWPEFARETFQAFRTTDVGRKLIIDQNVFIEGTLPMGVVRPLTEVEMDHYREPFLNPVDREPLWRFPNELPIAGEPANIVALVEEYMDWLHQSPVPKLLFWGTPGVLIPPAEAARLAKSLPNCKAVDIGPGLNLLQEDNPDLIGSEIARWLSTLEISG

SEQ ID NO: 1663 - protein, 277 aa, Synthetic construct
MFHYVDVGPRDGTPVLFLHGNPTSSYVWRNIIPHVAPTHRCIAPDLIGMGKSDKPDLGYFFDDHVRFMDAFIEALGLEEVILVIHDWGSALGFHWAKRNPERVKGIAFMEFIRPIPTWDEWPEFARETFQAFRTTDVGRKLIIDQNVFIEGTLPMGVVRPLTEVEMDHYREPFLNPVDREPLWRFPNELPIAGEPANIVALVEEYMDWLHQSPVPKLLFWGTPGVLIPPAEAARLAKSLPNCKAVDIGPGLNLLQEDNPDLIGSEIARWLSTLEISG

SEQ ID NO: 1664 - protein, 277 aa, Synthetic construct
MFHYVDVGPRDGTPVLFLHGNPTSSYVWRNIIPHVAPTHRCIAPDLIGMGKSDKPDLGYFFDDHVRFMDAFIEALGLEEVALVIHDWGSALGFHWAKRNPERVKGIAFMEFIRPIPTWDEWPEFARETFQAFRTTDVGRKLIIDQNVFIEGTLPMGVVRPLTEVEMDHYREPFLNPVDREPLWRFPNELPIAGEPANIVALVEEYMDWLHQSPVPKLLFWGTPGVLIPPAEAARLAKSLPNCKAVDIGPGLNLLQEDNPDLIGSEIARWLSTLEISG

SEQ ID NO: 1665 - protein, 277 aa, Synthetic construct
MFHYVDVGPRDGTPVLFLHGNPTSSYVWRNIIPHVAPTHRCIAPDLIGMGKSDKPDLGYFFDDHVRFMDAFIEALGLEEVFLVIHDWGSALGFHWAKRNPERVKGIAFMEFIRPIPTWDEWPEFARETFQAFRTTDVGRKLIIDQNVFIEGTLPMGVVRPLTEVEMDHYREPFLNPVDREPLWRFPNELPIAGEPANIVALVEEYMDWLHQSPVPKLLFWGTPGVLIPPAEAARLAKSLPNCKAVDIGPGLNLLQEDNPDLIGSEIARWLSTLEISG

SEQ ID NO: 1666 - protein, 277 aa, Synthetic construct
MFHYVDVGPRDGTPVLFLHGNPTSSYVWRNIIPHVAPTHRCIAPDLIGMGKSDKPDLGYFFDDHVRFMDAFIEALGLEEVLLVIHDWGSALGFHWAKRNPERVKGIAFMEFIRPIPTWDEWPEFARETFQAFRTTDVGRKLIIDQNVFIEGTLPMGVVRPLTEVEMDHYREPFLNPVDREPLWRFPNELPIAGEPANIVALVEEYMDWLHQSPVPKLLFWGTPGVLIPPAEAARLAKSLPNCKAVDIGPGLNLLQEDNPDLIGSEIARWLSTLEISG

SEQ ID NO: 1667 - protein, 277 aa, Synthetic construct
MFHYVDVGPRDGTPVLFLHGNPTSSYVWRNIIPHVAPTHRCIAPDLIGMGKSDKPDLGYFFDDHVRFMDAFIEALGLEEVSLVIHDWGSALGFHWAKRNPERVKGIAFMEFIRPIPTWDEWPEFARETFQAFRTTDVGRKLIIDQNVFIEGTLPMGVVRPLTEVEMDHYREPFLNPVDREPLWRFPNELPIAGEPANIVALVEEYMDWLHQSPVPKLLFWGTPGVLIPPAEAARLAKSLPNCKAVDIGPGLNLLQEDNPDLIGSEIARWLSTLEISG

SEQ ID NO: 1668 - protein, 277 aa, Synthetic construct
MFHYVDVGPRDGTPVLFLHGNPTSSYVWRNIIPHVAPTHRCIAPDLIGMGKSDKPDLGYFFDDHVRFMDAFIEALGLEEVVMVIHDWGSALGFHWAKRNPERVKGIAFMEFIRPIPTWDEWPEFARETFQAFRTTDVGRKLIIDQNVFIEGTLPMGVVRPLTEVEMDHYREPFLNPVDREPLWRFPNELPIAGEPANIVALVEEYMDWLHQSPVPKLLFWGTPGVLIPPAEAARLAKSLPNCKAVDIGPGLNLLQEDNPDLIGSEIARWLSTLEISG

SEQ ID NO: 1669 - protein, 277 aa, Synthetic construct
MFHYVDVGPRDGTPVLFLHGNPTSSYVWRNIIPHVAPTHRCIAPDLIGMGKSDKPDLGYFFDDHVRFMDAFIEALGLEEVVFVIHDWGSALGFHWAKRNPERVKGIAFMEFIRPIPTWDEWPEFARETFQAFRTTDVGRKLIIDQNVFIEGTLPMGVVRPLTEVEMDHYREPFLNPVDREPLWRFPNELPIAGEPANIVALVEEYMDWLHQSPVPKLLFWGTPGVLIPPAEAARLAKSLPNCKAVDIGPGLNLLQEDNPDLIGSEIARWLSTLEISG

SEQ ID NO: 1670 - protein, 277 aa, Synthetic construct
MFHYVDVGPRDGTPVLFLHGNPTSSYVWRNIIPHVAPTHRCIAPDLIGMGKSDKPDLGYFFDDHVRFMDAFIEALGLEEVVIVIHDWGSALGFHWAKRNPERVKGIAFMEFIRPIPTWDEWPEFARETFQAFRTTDVGRKLIIDQNVFIEGTLPMGVVRPLTEVEMDHYREPFLNPVDREPLWRFPNELPIAGEPANIVALVEEYMDWLHQSPVPKLLFWGTPGVLIPPAEAARLAKSLPNCKAVDIGPGLNLLQEDNPDLIGSEIARWLSTLEISG

SEQ ID NO: 1671 - protein, 277 aa, Synthetic construct
MFHYVDVGPRDGTPVLFLHGNPTSSYVWRNIIPHVAPTHRCIAPDLIGMGKSDKPDLGYFFDDHVRFMDAFIEALGLEEVVVVIHDWGSALGFHWAKRNPERVKGIAFMEFIRPIPTWDEWPEFARETFQAFRTTDVGRKLIIDQNVFIEGTLPMGVVRPLTEVEMDHYREPFLNPVDREPLWRFPNELPIAGEPANIVALVEEYMDWLHQSPVPKLLFWGTPGVLIPPAEAARLAKSLPNCKAVDIGPGLNLLQEDNPDLIGSEIARWLSTLEISG

SEQ ID NO: 1672 - protein, 277 aa, Synthetic construct
MFHYVDVGPRDGTPVLFLHGNPTSSYVWRNIIPHVAPTHRCIAPDLIGMGKSDKPDLGYFFDDHVRFMDAFIEALGLEEVVAVIHDWGSALGFHWAKRNPERVKGIAFMEFIRPIPTWDEWPEFARETFQAFRTTDVGRKLIIDQNVFIEGTLPMGVVRPLTEVEMDHYREPFLNPVDREPLWRFPNELPIAGEPANIVALVEEYMDWLHQSPVPKLLFWGTPGVLIPPAEAARLAKSLPNCKAVDIGPGLNLLQEDNPDLIGSEIARWLSTLEISG

SEQ ID NO: 1673 - protein, 277 aa, Synthetic construct
MFHYVDVGPRDGTPVLFLHGNPTSSYVWRNIIPHVAPTHRCIAPDLIGMGKSDKPDLGYFFDDHVRFMDAFIEALGLEEVVPVIHDWGSALGFHWAKRNPERVKGIAFMEFIRPIPTWDEWPEFARETFQAFRTTDVGRKLIIDQNVFIEGTLPMGVVRPLTEVEMDHYREPFLNPVDREPLWRFPNELPIAGEPANIVALVEEYMDWLHQSPVPKLLFWGTPGVLIPPAEAARLAKSLPNCKAVDIGPGLNLLQEDNPDLIGSEIARWLSTLEISG

SEQ ID NO: 1674 - protein, 277 aa, Synthetic construct
MFHYVDVGPRDGTPVLFLHGNPTSSYVWRNIIPHVAPTHRCIAPDLIGMGKSDKPDLGYFFDDHVRFMDAFIEALGLEEVVLIIHDWGSALGFHWAKRNPERVKGIAFMEFIRPIPTWDEWPEFARETFQAFRTTDVGRKLIIDQNVFIEGTLPMGVVRPLTEVEMDHYREPFLNPVDREPLWRFPNELPIAGEPANIVALVEEYMDWLHQSPVPKLLFWGTPGVLIPPAEAARLAKSLPNCKAVDIGPGLNLLQEDNPDLIGSEIARWLSTLEISG

SEQ ID NO: 1675 - protein, 277 aa, Synthetic construct
MFHYVDVGPRDGTPVLFLHGNPTSSYVWRNIIPHVAPTHRCIAPDLIGMGKSDKPDLGYFFDDHVRFMDAFIEALGLEEVVLAIHDWGSALGFHWAKRNPERVKGIAFMEFIRPIPTWDEWPEFARETFQAFRTTDVGRKLIIDQNVFIEGTLPMGVVRPLTEVEMDHYREPFLNPVDREPLWRFPNELPIAGEPANIVALVEEYMDWLHQSPVPKLLFWGTPGVLIPPAEAARLAKSLPNCKAVDIGPGLNLLQEDNPDLIGSEIARWLSTLEISG

SEQ ID NO: 1676 - protein, 277 aa, Synthetic construct
MFHYVDVGPRDGTPVLFLHGNPTSSYVWRNIIPHVAPTHRCIAPDLIGMGKSDKPDLGYFFDDHVRFMDAFIEALGLEEVVLLIHDWGSALGFHWAKRNPERVKGIAFMEFIRPIPTWDEWPEFARETFQAFRTTDVGRKLIIDQNVFIEGTLPMGVVRPLTEVEMDHYREPFLNPVDREPLWRFPNELPIAGEPANIVALVEEYMDWLHQSPVPKLLFWGTPGVLIPPAEAARLAKSLPNCKAVDIGPGLNLLQEDNPDLIGSEIARWLSTLEISG

SEQ ID NO: 1677 - protein, 277 aa, Synthetic construct
MFHYVDVGPRDGTPVLFLHGNPTSSYVWRNIIPHVAPTHRCIAPDLIGMGKSDKPDLGYFFDDHVRFMDAFIEALGLEEVVLMIHDWGSALGFHWAKRNPERVKGIAFMEFIRPIPTWDEWPEFARETFQAFRTTDVGRKLIIDQNVFIEGTLPMGVVRPLTEVEMDHYREPFLNPVDREPLWRFPNELPIAGEPANIVALVEEYMDWLHQSPVPKLLFWGTPGVLIPPAEAARLAKSLPNCKAVDIGPGLNLLQEDNPDLIGSEIARWLSTLEISG

SEQ ID NO: 1678 - protein, 277 aa, Synthetic construct
MFHYVDVGPRDGTPVLFLHGNPTSSYVWRNIIPHVAPTHRCIAPDLIGMGKSDKPDLGYFFDDHVRFMDAFIEALGLEEVVLCIHDWGSALGFHWAKRNPERVKGIAFMEFIRPIPTWDEWPEFARETFQAFRTTDVGRKLIIDQNVFIEGTLPMGVVRPLTEVEMDHYREPFLNPVDREPLWRFPNELPIAGEPANIVALVEEYMDWLHQSPVPKLLFWGTPGVLIPPAEAARLAKSLPNCKAVDIGPGLNLLQEDNPDLIGSEIARWLSTLEISG

SEQ ID NO: 1679 - protein, 277 aa, Synthetic construct
MFHYVDVGPRDGTPVLFLHGNPTSSYVWRNIIPHVAPTHRCIAPDLIGMGKSDKPDLGYFFDDHVRFMDAFIEALGLEEVVLFIHDWGSALGFHWAKRNPERVKGIAFMEFIRPIPTWDEWPEFARETFQAFRTTDVGRKLIIDQNVFIEGTLPMGVVRPLTEVEMDHYREPFLNPVDREPLWRFPNELPIAGEPANIVALVEEYMDWLHQSPVPKLLFWGTPGVLIPPAEAARLAKSLPNCKAVDIGPGLNLLQEDNPDLIGSEIARWLSTLEISG

SEQ ID NO: 1680 - protein, 277 aa, Synthetic construct
MFHYVDVGPRDGTPVLFLHGNPTSSYVWRNIIPHVAPTHRCIAPDLIGMGKSDKPDLGYFFDDHVRFMDAFIEALGLEEVVLVVHDWGSALGFHWAKRNPERVKGIAFMEFIRPIPTWDEWPEFARETFQAFRTTDVGRKLIIDQNVFIEGTLPMGVVRPLTEVEMDHYREPFLNPVDREPLWRFPNELPIAGEPANIVALVEEYMDWLHQSPVPKLLFWGTPGVLIPPAEAARLAKSLPNCKAVDIGPGLNLLQEDNPDLIGSEIARWLSTLEISG

SEQ ID NO: 1681 - protein, 277 aa, Synthetic construct
MFHYVDVGPRDGTPVLFLHGNPTSSYVWRNIIPHVAPTHRCIAPDLIGMGKSDKPDLGYFFDDHVRFMDAFIEALGLEEVVLVLHDWGSALGFHWAKRNPERVKGIAFMEFIRPIPTWDEWPEFARETFQAFRTTDVGRKLIIDQNVFIEGTLPMGVVRPLTEVEMDHYREPFLNPVDREPLWRFPNELPIAGEPANIVALVEEYMDWLHQSPVPKLLFWGTPGVLIPPAEAARLAKSLPNCKAVDIGPGLNLLQEDNPDLIGSEIARWLSTLEISG

SEQ ID NO: 1682 - protein, 277 aa, Synthetic construct
MFHYVDVGPRDGTPVLFLHGNPTSSYVWRNIIPHVAPTHRCIAPDLIGMGKSDKPDLGYFFDDHVRFMDAFIEALGLEEVVLVMHDWGSALGFHWAKRNPERVKGIAFMEFIRPIPTWDEWPEFARETFQAFRTTDVGRKLIIDQNVFIEGTLPMGVVRPLTEVEMDHYREPFLNPVDREPLWRFPNELPIAGEPANIVALVEEYMDWLHQSPVPKLLFWGTPGVLIPPAEAARLAKSLPNCKAVDIGPGLNLLQEDNPDLIGSEIARWLSTLEISG

SEQ ID NO: 1683 - protein, 277 aa, Synthetic construct
MFHYVDVGPRDGTPVLFLHGNPTSSYVWRNIIPHVAPTHRCIAPDLIGMGKSDKPDLGYFFDDHVRFMDAFIEALGLEEVVLVGHDWGSALGFHWAKRNPERVKGIAFMEFIRPIPTWDEWPEFARETFQAFRTTDVGRKLIIDQNVFIEGTLPMGVVRPLTEVEMDHYREPFLNPVDREPLWRFPNELPIAGEPANIVALVEEYMDWLHQSPVPKLLFWGTPGVLIPPAEAARLAKSLPNCKAVDIGPGLNLLQEDNPDLIGSEIARWLSTLEISG

SEQ ID NO: 1684 - protein, 277 aa, Synthetic construct
MFHYVDVGPRDGTPVLFLHGNPTSSYVWRNIIPHVAPTHRCIAPDLIGMGKSDKPDLGYFFDDHVRFMDAFIEALGLEEVVLVAHDWGSALGFHWAKRNPERVKGIAFMEFIRPIPTWDEWPEFARETFQAFRTTDVGRKLIIDQNVFIEGTLPMGVVRPLTEVEMDHYREPFLNPVDREPLWRFPNELPIAGEPANIVALVEEYMDWLHQSPVPKLLFWGTPGVLIPPAEAARLAKSLPNCKAVDIGPGLNLLQEDNPDLIGSEIARWLSTLEISG

SEQ ID NO: 1685 - protein, 277 aa, Synthetic construct
MFHYVDVGPRDGTPVLFLHGNPTSSYVWRNIIPHVAPTHRCIAPDLIGMGKSDKPDLGYFFDDHVRFMDAFIEALGLEEVVLVCHDWGSALGFHWAKRNPERVKGIAFMEFIRPIPTWDEWPEFARETFQAFRTTDVGRKLIIDQNVFIEGTLPMGVVRPLTEVEMDHYREPFLNPVDREPLWRFPNELPIAGEPANIVALVEEYMDWLHQSPVPKLLFWGTPGVLIPPAEAARLAKSLPNCKAVDIGPGLNLLQEDNPDLIGSEIARWLSTLEISG

SEQ ID NO: 1686 - protein, 277 aa, Synthetic construct
MFHYVDVGPRDGTPVLFLHGNPTSSYVWRNIIPHVAPTHRCIAPDLIGMGKSDKPDLGYFFDDHVRFMDAFIEALGLEEVVLVIQDWGSALGFHWAKRNPERVKGIAFMEFIRPIPTWDEWPEFARETFQAFRTTDVGRKLIIDQNVFIEGTLPMGVVRPLTEVEMDHYREPFLNPVDREPLWRFPNELPIAGEPANIVALVEEYMDWLHQSPVPKLLFWGTPGVLIPPAEAARLAKSLPNCKAVDIGPGLNLLQEDNPDLIGSEIARWLSTLEISG

SEQ ID NO: 1687 - protein, 277 aa, Synthetic construct
MFHYVDVGPRDGTPVLFLHGNPTSSYVWRNIIPHVAPTHRCIAPDLIGMGKSDKPDLGYFFDDHVRFMDAFIEALGLEEVVLVINDWGSALGFHWAKRNPERVKGIAFMEFIRPIPTWDEWPEFARETFQAFRTTDVGRKLIIDQNVFIEGTLPMGVVRPLTEVEMDHYREPFLNPVDREPLWRFPNELPIAGEPANIVALVEEYMDWLHQSPVPKLLFWGTPGVLIPPAEAARLAKSLPNCKAVDIGPGLNLLQEDNPDLIGSEIARWLSTLEISG

SEQ ID NO: 1688 - protein, 277 aa, Synthetic construct
MFHYVDVGPRDGTPVLFLHGNPTSSYVWRNIIPHVAPTHRCIAPDLIGMGKSDKPDLGYFFDDHVRFMDAFIEALGLEEVVLVISDWGSALGFHWAKRNPERVKGIAFMEFIRPIPTWDEWPEFARETFQAFRTTDVGRKLIIDQNVFIEGTLPMGVVRPLTEVEMDHYREPFLNPVDREPLWRFPNELPIAGEPANIVALVEEYMDWLHQSPVPKLLFWGTPGVLIPPAEAARLAKSLPNCKAVDIGPGLNLLQEDNPDLIGSEIARWLSTLEISG

SEQ ID NO: 1689 - protein, 277 aa, Synthetic construct
MFHYVDVGPRDGTPVLFLHGNPTSSYVWRNIIPHVAPTHRCIAPDLIGMGKSDKPDLGYFFDDHVRFMDAFIEALGLEEVVLVITDWGSALGFHWAKRNPERVKGIAFMEFIRPIPTWDEWPEFARETFQAFRTTDVGRKLIIDQNVFIEGTLPMGVVRPLTEVEMDHYREPFLNPVDREPLWRFPNELPIAGEPANIVALVEEYMDWLHQSPVPKLLFWGTPGVLIPPAEAARLAKSLPNCKAVDIGPGLNLLQEDNPDLIGSEIARWLSTLEISG

SEQ ID NO: 1690 - protein, 277 aa, Synthetic construct
MFHYVDVGPRDGTPVLFLHGNPTSSYVWRNIIPHVAPTHRCIAPDLIGMGKSDKPDLGYFFDDHVRFMDAFIEALGLEEVVLVIPDWGSALGFHWAKRNPERVKGIAFMEFIRPIPTWDEWPEFARETFQAFRTTDVGRKLIIDQNVFIEGTLPMGVVRPLTEVEMDHYREPFLNPVDREPLWRFPNELPIAGEPANIVALVEEYMDWLHQSPVPKLLFWGTPGVLIPPAEAARLAKSLPNCKAVDIGPGLNLLQEDNPDLIGSEIARWLSTLEISG

SEQ ID NO: 1691 - protein, 277 aa, Synthetic construct
MFHYVDVGPRDGTPVLFLHGNPTSSYVWRNIIPHVAPTHRCIAPDLIGMGKSDKPDLGYFFDDHVRFMDAFIEALGLEEVVLVIADWGSALGFHWAKRNPERVKGIAFMEFIRPIPTWDEWPEFARETFQAFRTTDVGRKLIIDQNVFIEGTLPMGVVRPLTEVEMDHYREPFLNPVDREPLWRFPNELPIAGEPANIVALVEEYMDWLHQSPVPKLLFWGTPGVLIPPAEAARLAKSLPNCKAVDIGPGLNLLQEDNPDLIGSEIARWLSTLEISG

SEQ ID NO: 1692 - protein, 277 aa, Synthetic construct
MFHYVDVGPRDGTPVLFLHGNPTSSYVWRNIIPHVAPTHRCIAPDLIGMGKSDKPDLGYFFDDHVRFMDAFIEALGLEEVVLVIHGWGSALGFHWAKRNPERVKGIAFMEFIRPIPTWDEWPEFARETFQAFRTTDVGRKLIIDQNVFIEGTLPMGVVRPLTEVEMDHYREPFLNPVDREPLWRFPNELPIAGEPANIVALVEEYMDWLHQSPVPKLLFWGTPGVLIPPAEAARLAKSLPNCKAVDIGPGLNLLQEDNPDLIGSEIARWLSTLEISG

SEQ ID NO: 1693 - protein, 277 aa, Synthetic construct
MFHYVDVGPRDGTPVLFLHGNPTSSYVWRNIIPHVAPTHRCIAPDLIGMGKSDKPDLGYFFDDHVRFMDAFIEALGLEEVVLVIHEWGSALGFHWAKRNPERVKGIAFMEFIRPIPTWDEWPEFARETFQAFRTTDVGRKLIIDQNVFIEGTLPMGVVRPLTEVEMDHYREPFLNPVDREPLWRFPNELPIAGEPANIVALVEEYMDWLHQSPVPKLLFWGTPGVLIPPAEAARLAKSLPNCKAVDIGPGLNLLQEDNPDLIGSEIARWLSTLEISG

SEQ ID NO: 1694 - protein, 277 aa, Synthetic construct
MFHYVDVGPRDGTPVLFLHGNPTSSYVWRNIIPHVAPTHRCIAPDLIGMGKSDKPDLGYFFDDHVRFMDAFIEALGLEEVVLVIHNWGSALGFHWAKRNPERVKGIAFMEFIRPIPTWDEWPEFARETFQAFRTTDVGRKLIIDQNVFIEGTLPMGVVRPLTEVEMDHYREPFLNPVDREPLWRFPNELPIAGEPANIVALVEEYMDWLHQSPVPKLLFWGTPGVLIPPAEAARLAKSLPNCKAVDIGPGLNLLQEDNPDLIGSEIARWLSTLEISG

SEQ ID NO: 1695 - protein, 277 aa, Synthetic construct
MFHYVDVGPRDGTPVLFLHGNPTSSYVWRNIIPHVAPTHRCIAPDLIGMGKSDKPDLGYFFDDHVRFMDAFIEALGLEEVVLVIHSWGSALGFHWAKRNPERVKGIAFMEFIRPIPTWDEWPEFARETFQAFRTTDVGRKLIIDQNVFIEGTLPMGVVRPLTEVEMDHYREPFLNPVDREPLWRFPNELPIAGEPANIVALVEEYMDWLHQSPVPKLLFWGTPGVLIPPAEAARLAKSLPNCKAVDIGPGLNLLQEDNPDLIGSEIARWLSTLEISG

SEQ ID NO: 1696 - protein, 277 aa, Synthetic construct
MFHYVDVGPRDGTPVLFLHGNPTSSYVWRNIIPHVAPTHRCIAPDLIGMGKSDKPDLGYFFDDHVRFMDAFIEALGLEEVVLVIHAWGSALGFHWAKRNPERVKGIAFMEFIRPIPTWDEWPEFARETFQAFRTTDVGRKLIIDQNVFIEGTLPMGVVRPLTEVEMDHYREPFLNPVDREPLWRFPNELPIAGEPANIVALVEEYMDWLHQSPVPKLLFWGTPGVLIPPAEAARLAKSLPNCKAVDIGPGLNLLQEDNPDLIGSEIARWLSTLEISG

SEQ ID NO: 1697 - protein, 277 aa, Synthetic construct
MFHYVDVGPRDGTPVLFLHGNPTSSYVWRNIIPHVAPTHRCIAPDLIGMGKSDKPDLGYFFDDHVRFMDAFIEALGLEEVVLVIHHWGSALGFHWAKRNPERVKGIAFMEFIRPIPTWDEWPEFARETFQAFRTTDVGRKLIIDQNVFIEGTLPMGVVRPLTEVEMDHYREPFLNPVDREPLWRFPNELPIAGEPANIVALVEEYMDWLHQSPVPKLLFWGTPGVLIPPAEAARLAKSLPNCKAVDIGPGLNLLQEDNPDLIGSEIARWLSTLEISG

SEQ ID NO: 1698 - protein, 277 aa, Synthetic construct
MFHYVDVGPRDGTPVLFLHGNPTSSYVWRNIIPHVAPTHRCIAPDLIGMGKSDKPDLGYFFDDHVRFMDAFIEALGLEEVVLVIHDFGSALGFHWAKRNPERVKGIAFMEFIRPIPTWDEWPEFARETFQAFRTTDVGRKLIIDQNVFIEGTLPMGVVRPLTEVEMDHYREPFLNPVDREPLWRFPNELPIAGEPANIVALVEEYMDWLHQSPVPKLLFWGTPGVLIPPAEAARLAKSLPNCKAVDIGPGLNLLQEDNPDLIGSEIARWLSTLEISG

SEQ ID NO: 1699 - protein, 277 aa, Synthetic construct
MFHYVDVGPRDGTPVLFLHGNPTSSYVWRNIIPHVAPTHRCIAPDLIGMGKSDKPDLGYFFDDHVRFMDAFIEALGLEEVVLVIHDYGSALGFHWAKRNPERVKGIAFMEFIRPIPTWDEWPEFARETFQAFRTTDVGRKLIIDQNVFIEGTLPMGVVRPLTEVEMDHYREPFLNPVDREPLWRFPNELPIAGEPANIVALVEEYMDWLHQSPVPKLLFWGTPGVLIPPAEAARLAKSLPNCKAVDIGPGLNLLQEDNPDLIGSEIARWLSTLEISG

SEQ ID NO: 1700 - protein, 277 aa, Synthetic construct
MFHYVDVGPRDGTPVLFLHGNPTSSYVWRNIIPHVAPTHRCIAPDLIGMGKSDKPDLGYFFDDHVRFMDAFIEALGLEEVVLVIHDLGSALGFHWAKRNPERVKGIAFMEFIRPIPTWDEWPEFARETFQAFRTTDVGRKLIIDQNVFIEGTLPMGVVRPLTEVEMDHYREPFLNPVDREPLWRFPNELPIAGEPANIVALVEEYMDWLHQSPVPKLLFWGTPGVLIPPAEAARLAKSLPNCKAVDIGPGLNLLQEDNPDLIGSEIARWLSTLEISG

SEQ ID NO: 1701 - protein, 277 aa, Synthetic construct
MFHYVDVGPRDGTPVLFLHGNPTSSYVWRNIIPHVAPTHRCIAPDLIGMGKSDKPDLGYFFDDHVRFMDAFIEALGLEEVVLVIHDSGSALGFHWAKRNPERVKGIAFMEFIRPIPTWDEWPEFARETFQAFRTTDVGRKLIIDQNVFIEGTLPMGVVRPLTEVEMDHYREPFLNPVDREPLWRFPNELPIAGEPANIVALVEEYMDWLHQSPVPKLLFWGTPGVLIPPAEAARLAKSLPNCKAVDIGPGLNLLQEDNPDLIGSEIARWLSTLEISG

SEQ ID NO: 1702 - protein, 277 aa, Synthetic construct
MFHYVDVGPRDGTPVLFLHGNPTSSYVWRNIIPHVAPTHRCIAPDLIGMGKSDKPDLGYFFDDHVRFMDAFIEALGLEEVVLVIHDIGSALGFHWAKRNPERVKGIAFMEFIRPIPTWDEWPEFARETFQAFRTTDVGRKLIIDQNVFIEGTLPMGVVRPLTEVEMDHYREPFLNPVDREPLWRFPNELPIAGEPANIVALVEEYMDWLHQSPVPKLLFWGTPGVLIPPAEAARLAKSLPNCKAVDIGPGLNLLQEDNPDLIGSEIARWLSTLEISG

SEQ ID NO: 1703 - protein, 277 aa, Synthetic construct
MFHYVDVGPRDGTPVLFLHGNPTSSYVWRNIIPHVAPTHRCIAPDLIGMGKSDKPDLGYFFDDHVRFMDAFIEALGLEEVVLVIHDMGSALGFHWAKRNPERVKGIAFMEFIRPIPTWDEWPEFARETFQAFRTTDVGRKLIIDQNVFIEGTLPMGVVRPLTEVEMDHYREPFLNPVDREPLWRFPNELPIAGEPANIVALVEEYMDWLHQSPVPKLLFWGTPGVLIPPAEAARLAKSLPNCKAVDIGPGLNLLQEDNPDLIGSEIARWLSTLEISG

SEQ ID NO: 1704 - protein, 277 aa, Synthetic construct
MFHYVDVGPRDGTPVLFLHGNPTSSYVWRNIIPHVAPTHRCIAPDLIGMGKSDKPDLGYFFDDHVRFMDAFIEALGLEEVVLVIHDWASALGFHWAKRNPERVKGIAFMEFIRPIPTWDEWPEFARETFQAFRTTDVGRKLIIDQNVFIEGTLPMGVVRPLTEVEMDHYREPFLNPVDREPLWRFPNELPIAGEPANIVALVEEYMDWLHQSPVPKLLFWGTPGVLIPPAEAARLAKSLPNCKAVDIGPGLNLLQEDNPDLIGSEIARWLSTLEISG

SEQ ID NO: 1705 - protein, 277 aa, Synthetic construct
MFHYVDVGPRDGTPVLFLHGNPTSSYVWRNIIPHVAPTHRCIAPDLIGMGKSDKPDLGYFFDDHVRFMDAFIEALGLEEVVLVIHDWSSALGFHWAKRNPERVKGIAFMEFIRPIPTWDEWPEFARETFQAFRTTDVGRKLIIDQNVFIEGTLPMGVVRPLTEVEMDHYREPFLNPVDREPLWRFPNELPIAGEPANIVALVEEYMDWLHQSPVPKLLFWGTPGVLIPPAEAARLAKSLPNCKAVDIGPGLNLLQEDNPDLIGSEIARWLSTLEISG

SEQ ID NO: 1706 - protein, 277 aa, Synthetic construct
MFHYVDVGPRDGTPVLFLHGNPTSSYVWRNIIPHVAPTHRCIAPDLIGMGKSDKPDLGYFFDDHVRFMDAFIEALGLEEVVLVIHDWCSALGFHWAKRNPERVKGIAFMEFIRPIPTWDEWPEFARETFQAFRTTDVGRKLIIDQNVFIEGTLPMGVVRPLTEVEMDHYREPFLNPVDREPLWRFPNELPIAGEPANIVALVEEYMDWLHQSPVPKLLFWGTPGVLIPPAEAARLAKSLPNCKAVDIGPGLNLLQEDNPDLIGSEIARWLSTLEISG

SEQ ID NO: 1707 - protein, 277 aa, Synthetic construct
MFHYVDVGPRDGTPVLFLHGNPTSSYVWRNIIPHVAPTHRCIAPDLIGMGKSDKPDLGYFFDDHVRFMDAFIEALGLEEVVLVIHDWDSALGFHWAKRNPERVKGIAFMEFIRPIPTWDEWPEFARETFQAFRTTDVGRKLIIDQNVFIEGTLPMGVVRPLTEVEMDHYREPFLNPVDREPLWRFPNELPIAGEPANIVALVEEYMDWLHQSPVPKLLFWGTPGVLIPPAEAARLAKSLPNCKAVDIGPGLNLLQEDNPDLIGSEIARWLSTLEISG

SEQ ID NO: 1708 - protein, 277 aa, Synthetic construct
MFHYVDVGPRDGTPVLFLHGNPTSSYVWRNIIPHVAPTHRCIAPDLIGMGKSDKPDLGYFFDDHVRFMDAFIEALGLEEVVLVIHDWTSALGFHWAKRNPERVKGIAFMEFIRPIPTWDEWPEFARETFQAFRTTDVGRKLIIDQNVFIEGTLPMGVVRPLTEVEMDHYREPFLNPVDREPLWRFPNELPIAGEPANIVALVEEYMDWLHQSPVPKLLFWGTPGVLIPPAEAARLAKSLPNCKAVDIGPGLNLLQEDNPDLIGSEIARWLSTLEISG

SEQ ID NO: 1709 - protein, 277 aa, Synthetic construct
MFHYVDVGPRDGTPVLFLHGNPTSSYVWRNIIPHVAPTHRCIAPDLIGMGKSDKPDLGYFFDDHVRFMDAFIEALGLEEVVLVIHDWVSALGFHWAKRNPERVKGIAFMEFIRPIPTWDEWPEFARETFQAFRTTDVGRKLIIDQNVFIEGTLPMGVVRPLTEVEMDHYREPFLNPVDREPLWRFPNELPIAGEPANIVALVEEYMDWLHQSPVPKLLFWGTPGVLIPPAEAARLAKSLPNCKAVDIGPGLNLLQEDNPDLIGSEIARWLSTLEISG

SEQ ID NO: 1710 - protein, 277 aa, Synthetic construct
MFHYVDVGPRDGTPVLFLHGNPTSSYVWRNIIPHVAPTHRCIAPDLIGMGKSDKPDLGYFFDDHVRFMDAFIEALGLEEVVLVIHDWGTALGFHWAKRNPERVKGIAFMEFIRPIPTWDEWPEFARETFQAFRTTDVGRKLIIDQNVFIEGTLPMGVVRPLTEVEMDHYREPFLNPVDREPLWRFPNELPIAGEPANIVALVEEYMDWLHQSPVPKLLFWGTPGVLIPPAEAARLAKSLPNCKAVDIGPGLNLLQEDNPDLIGSEIARWLSTLEISG

SEQ ID NO: 1711 - protein, 277 aa, Synthetic construct
MFHYVDVGPRDGTPVLFLHGNPTSSYVWRNIIPHVAPTHRCIAPDLIGMGKSDKPDLGYFFDDHVRFMDAFIEALGLEEVVLVIHDWGAALGFHWAKRNPERVKGIAFMEFIRPIPTWDEWPEFARETFQAFRTTDVGRKLIIDQNVFIEGTLPMGVVRPLTEVEMDHYREPFLNPVDREPLWRFPNELPIAGEPANIVALVEEYMDWLHQSPVPKLLFWGTPGVLIPPAEAARLAKSLPNCKAVDIGPGLNLLQEDNPDLIGSEIARWLSTLEISG

SEQ ID NO: 1712 - protein, 277 aa, Synthetic construct
MFHYVDVGPRDGTPVLFLHGNPTSSYVWRNIIPHVAPTHRCIAPDLIGMGKSDKPDLGYFFDDHVRFMDAFIEALGLEEVVLVIHDWGGALGFHWAKRNPERVKGIAFMEFIRPIPTWDEWPEFARETFQAFRTTDVGRKLIIDQNVFIEGTLPMGVVRPLTEVEMDHYREPFLNPVDREPLWRFPNELPIAGEPANIVALVEEYMDWLHQSPVPKLLFWGTPGVLIPPAEAARLAKSLPNCKAVDIGPGLNLLQEDNPDLIGSEIARWLSTLEISG

SEQ ID NO: 1713 - protein, 277 aa, Synthetic construct
MFHYVDVGPRDGTPVLFLHGNPTSSYVWRNIIPHVAPTHRCIAPDLIGMGKSDKPDLGYFFDDHVRFMDAFIEALGLEEVVLVIHDWGCALGFHWAKRNPERVKGIAFMEFIRPIPTWDEWPEFARETFQAFRTTDVGRKLIIDQNVFIEGTLPMGVVRPLTEVEMDHYREPFLNPVDREPLWRFPNELPIAGEPANIVALVEEYMDWLHQSPVPKLLFWGTPGVLIPPAEAARLAKSLPNCKAVDIGPGLNLLQEDNPDLIGSEIARWLSTLEISG

SEQ ID NO: 1714 - protein, 277 aa, Synthetic construct
MFHYVDVGPRDGTPVLFLHGNPTSSYVWRNIIPHVAPTHRCIAPDLIGMGKSDKPDLGYFFDDHVRFMDAFIEALGLEEVVLVIHDWGNALGFHWAKRNPERVKGIAFMEFIRPIPTWDEWPEFARETFQAFRTTDVGRKLIIDQNVFIEGTLPMGVVRPLTEVEMDHYREPFLNPVDREPLWRFPNELPIAGEPANIVALVEEYMDWLHQSPVPKLLFWGTPGVLIPPAEAARLAKSLPNCKAVDIGPGLNLLQEDNPDLIGSEIARWLSTLEISG

SEQ ID NO: 1715 - protein, 277 aa, Synthetic construct
MFHYVDVGPRDGTPVLFLHGNPTSSYVWRNIIPHVAPTHRCIAPDLIGMGKSDKPDLGYFFDDHVRFMDAFIEALGLEEVVLVIHDWGVALGFHWAKRNPERVKGIAFMEFIRPIPTWDEWPEFARETFQAFRTTDVGRKLIIDQNVFIEGTLPMGVVRPLTEVEMDHYREPFLNPVDREPLWRFPNELPIAGEPANIVALVEEYMDWLHQSPVPKLLFWGTPGVLIPPAEAARLAKSLPNCKAVDIGPGLNLLQEDNPDLIGSEIARWLSTLEISG

SEQ ID NO: 1716 - protein, 277 aa, Synthetic construct
MFHYVDVGPRDGTPVLFLHGNPTSSYVWRNIIPHVAPTHRCIAPDLIGMGKSDKPDLGYFFDDHVRFMDAFIEALGLEEVVLVIHDWGSGLGFHWAKRNPERVKGIAFMEFIRPIPTWDEWPEFARETFQAFRTTDVGRKLIIDQNVFIEGTLPMGVVRPLTEVEMDHYREPFLNPVDREPLWRFPNELPIAGEPANIVALVEEYMDWLHQSPVPKLLFWGTPGVLIPPAEAARLAKSLPNCKAVDIGPGLNLLQEDNPDLIGSEIARWLSTLEISG

SEQ ID NO: 1717 - protein, 277 aa, Synthetic construct
MFHYVDVGPRDGTPVLFLHGNPTSSYVWRNIIPHVAPTHRCIAPDLIGMGKSDKPDLGYFFDDHVRFMDAFIEALGLEEVVLVIHDWGSSLGFHWAKRNPERVKGIAFMEFIRPIPTWDEWPEFARETFQAFRTTDVGRKLIIDQNVFIEGTLPMGVVRPLTEVEMDHYREPFLNPVDREPLWRFPNELPIAGEPANIVALVEEYMDWLHQSPVPKLLFWGTPGVLIPPAEAARLAKSLPNCKAVDIGPGLNLLQEDNPDLIGSEIARWLSTLEISG

SEQ ID NO: 1718 - protein, 277 aa, Synthetic construct
MFHYVDVGPRDGTPVLFLHGNPTSSYVWRNIIPHVAPTHRCIAPDLIGMGKSDKPDLGYFFDDHVRFMDAFIEALGLEEVVLVIHDWGSVLGFHWAKRNPERVKGIAFMEFIRPIPTWDEWPEFARETFQAFRTTDVGRKLIIDQNVFIEGTLPMGVVRPLTEVEMDHYREPFLNPVDREPLWRFPNELPIAGEPANIVALVEEYMDWLHQSPVPKLLFWGTPGVLIPPAEAARLAKSLPNCKAVDIGPGLNLLQEDNPDLIGSEIARWLSTLEISG

SEQ ID NO: 1719 - protein, 277 aa, Synthetic construct
MFHYVDVGPRDGTPVLFLHGNPTSSYVWRNIIPHVAPTHRCIAPDLIGMGKSDKPDLGYFFDDHVRFMDAFIEALGLEEVVLVIHDWGSPLGFHWAKRNPERVKGIAFMEFIRPIPTWDEWPEFARETFQAFRTTDVGRKLIIDQNVFIEGTLPMGVVRPLTEVEMDHYREPFLNPVDREPLWRFPNELPIAGEPANIVALVEEYMDWLHQSPVPKLLFWGTPGVLIPPAEAARLAKSLPNCKAVDIGPGLNLLQEDNPDLIGSEIARWLSTLEISG

SEQ ID NO: 1720 - protein, 277 aa, Synthetic construct
MFHYVDVGPRDGTPVLFLHGNPTSSYVWRNIIPHVAPTHRCIAPDLIGMGKSDKPDLGYFFDDHVRFMDAFIEALGLEEVVLVIHDWGSTLGFHWAKRNPERVKGIAFMEFIRPIPTWDEWPEFARETFQAFRTTDVGRKLIIDQNVFIEGTLPMGVVRPLTEVEMDHYREPFLNPVDREPLWRFPNELPIAGEPANIVALVEEYMDWLHQSPVPKLLFWGTPGVLIPPAEAARLAKSLPNCKAVDIGPGLNLLQEDNPDLIGSEIARWLSTLEISG

SEQ ID NO: 1721 - protein, 277 aa, Synthetic construct
MFHYVDVGPRDGTPVLFLHGNPTSSYVWRNIIPHVAPTHRCIAPDLIGMGKSDKPDLGYFFDDHVRFMDAFIEALGLEEVVLVIHDWGSILGFHWAKRNPERVKGIAFMEFIRPIPTWDEWPEFARETFQAFRTTDVGRKLIIDQNVFIEGTLPMGVVRPLTEVEMDHYREPFLNPVDREPLWRFPNELPIAGEPANIVALVEEYMDWLHQSPVPKLLFWGTPGVLIPPAEAARLAKSLPNCKAVDIGPGLNLLQEDNPDLIGSEIARWLSTLEISG

SEQ ID NO: 1722 - protein, 277 aa, Synthetic construct
MFHYVDVGPRDGTPVLFLHGNPTSSYVWRNIIPHVAPTHRCIAPDLIGMGKSDKPDLGYFFDDHVRFMDAFIEALGLEEVVLVIHDWGSAIGFHWAKRNPERVKGIAFMEFIRPIPTWDEWPEFARETFQAFRTTDVGRKLIIDQNVFIEGTLPMGVVRPLTEVEMDHYREPFLNPVDREPLWRFPNELPIAGEPANIVALVEEYMDWLHQSPVPKLLFWGTPGVLIPPAEAARLAKSLPNCKAVDIGPGLNLLQEDNPDLIGSEIARWLSTLEISG

SEQ ID NO: 1723 - protein, 277 aa, Synthetic construct
MFHYVDVGPRDGTPVLFLHGNPTSSYVWRNIIPHVAPTHRCIAPDLIGMGKSDKPDLGYFFDDHVRFMDAFIEALGLEEVVLVIHDWGSAVGFHWAKRNPERVKGIAFMEFIRPIPTWDEWPEFARETFQAFRTTDVGRKLIIDQNVFIEGTLPMGVVRPLTEVEMDHYREPFLNPVDREPLWRFPNELPIAGEPANIVALVEEYMDWLHQSPVPKLLFWGTPGVLIPPAEAARLAKSLPNCKAVDIGPGLNLLQEDNPDLIGSEIARWLSTLEISG

SEQ ID NO: 1724 - protein, 277 aa, Synthetic construct
MFHYVDVGPRDGTPVLFLHGNPTSSYVWRNIIPHVAPTHRCIAPDLIGMGKSDKPDLGYFFDDHVRFMDAFIEALGLEEVVLVIHDWGSAFGFHWAKRNPERVKGIAFMEFIRPIPTWDEWPEFARETFQAFRTTDVGRKLIIDQNVFIEGTLPMGVVRPLTEVEMDHYREPFLNPVDREPLWRFPNELPIAGEPANIVALVEEYMDWLHQSPVPKLLFWGTPGVLIPPAEAARLAKSLPNCKAVDIGPGLNLLQEDNPDLIGSEIARWLSTLEISG

SEQ ID NO: 1725 - protein, 277 aa, Synthetic construct
MFHYVDVGPRDGTPVLFLHGNPTSSYVWRNIIPHVAPTHRCIAPDLIGMGKSDKPDLGYFFDDHVRFMDAFIEALGLEEVVLVIHDWGSAMGFHWAKRNPERVKGIAFMEFIRPIPTWDEWPEFARETFQAFRTTDVGRKLIIDQNVFIEGTLPMGVVRPLTEVEMDHYREPFLNPVDREPLWRFPNELPIAGEPANIVALVEEYMDWLHQSPVPKLLFWGTPGVLIPPAEAARLAKSLPNCKAVDIGPGLNLLQEDNPDLIGSEIARWLSTLEISG

SEQ ID NO: 1726 - protein, 277 aa, Synthetic construct
MFHYVDVGPRDGTPVLFLHGNPTSSYVWRNIIPHVAPTHRCIAPDLIGMGKSDKPDLGYFFDDHVRFMDAFIEALGLEEVVLVIHDWGSAAGFHWAKRNPERVKGIAFMEFIRPIPTWDEWPEFARETFQAFRTTDVGRKLIIDQNVFIEGTLPMGVVRPLTEVEMDHYREPFLNPVDREPLWRFPNELPIAGEPANIVALVEEYMDWLHQSPVPKLLFWGTPGVLIPPAEAARLAKSLPNCKAVDIGPGLNLLQEDNPDLIGSEIARWLSTLEISG

SEQ ID NO: 1727 - protein, 277 aa, Synthetic construct
MFHYVDVGPRDGTPVLFLHGNPTSSYVWRNIIPHVAPTHRCIAPDLIGMGKSDKPDLGYFFDDHVRFMDAFIEALGLEEVVLVIHDWGSATGFHWAKRNPERVKGIAFMEFIRPIPTWDEWPEFARETFQAFRTTDVGRKLIIDQNVFIEGTLPMGVVRPLTEVEMDHYREPFLNPVDREPLWRFPNELPIAGEPANIVALVEEYMDWLHQSPVPKLLFWGTPGVLIPPAEAARLAKSLPNCKAVDIGPGLNLLQEDNPDLIGSEIARWLSTLEISG

SEQ ID NO: 1728 - protein, 277 aa, Synthetic construct
MFHYVDVGPRDGTPVLFLHGNPTSSYVWRNIIPHVAPTHRCIAPDLIGMGKSDKPDLGYFFDDHVRFMDAFIEALGLEEVVLVIHDWGSALAFHWAKRNPERVKGIAFMEFIRPIPTWDEWPEFARETFQAFRTTDVGRKLIIDQNVFIEGTLPMGVVRPLTEVEMDHYREPFLNPVDREPLWRFPNELPIAGEPANIVALVEEYMDWLHQSPVPKLLFWGTPGVLIPPAEAARLAKSLPNCKAVDIGPGLNLLQEDNPDLIGSEIARWLSTLEISG

SEQ ID NO: 1729 - protein, 277 aa, Synthetic construct
MFHYVDVGPRDGTPVLFLHGNPTSSYVWRNIIPHVAPTHRCIAPDLIGMGKSDKPDLGYFFDDHVRFMDAFIEALGLEEVVLVIHDWGSALSFHWAKRNPERVKGIAFMEFIRPIPTWDEWPEFARETFQAFRTTDVGRKLIIDQNVFIEGTLPMGVVRPLTEVEMDHYREPFLNPVDREPLWRFPNELPIAGEPANIVALVEEYMDWLHQSPVPKLLFWGTPGVLIPPAEAARLAKSLPNCKAVDIGPGLNLLQEDNPDLIGSEIARWLSTLEISG

SEQ ID NO: 1730 - protein, 277 aa, Synthetic construct
MFHYVDVGPRDGTPVLFLHGNPTSSYVWRNIIPHVAPTHRCIAPDLIGMGKSDKPDLGYFFDDHVRFMDAFIEALGLEEVVLVIHDWGSALTFHWAKRNPERVKGIAFMEFIRPIPTWDEWPEFARETFQAFRTTDVGRKLIIDQNVFIEGTLPMGVVRPLTEVEMDHYREPFLNPVDREPLWRFPNELPIAGEPANIVALVEEYMDWLHQSPVPKLLFWGTPGVLIPPAEAARLAKSLPNCKAVDIGPGLNLLQEDNPDLIGSEIARWLSTLEISG

SEQ ID NO: 1731 - protein, 277 aa, Synthetic construct
MFHYVDVGPRDGTPVLFLHGNPTSSYVWRNIIPHVAPTHRCIAPDLIGMGKSDKPDLGYFFDDHVRFMDAFIEALGLEEVVLVIHDWGSALCFHWAKRNPERVKGIAFMEFIRPIPTWDEWPEFARETFQAFRTTDVGRKLIIDQNVFIEGTLPMGVVRPLTEVEMDHYREPFLNPVDREPLWRFPNELPIAGEPANIVALVEEYMDWLHQSPVPKLLFWGTPGVLIPPAEAARLAKSLPNCKAVDIGPGLNLLQEDNPDLIGSEIARWLSTLEISG

SEQ ID NO: 1732 - protein, 277 aa, Synthetic construct
MFHYVDVGPRDGTPVLFLHGNPTSSYVWRNIIPHVAPTHRCIAPDLIGMGKSDKPDLGYFFDDHVRFMDAFIEALGLEEVVLVIHDWGSALVFHWAKRNPERVKGIAFMEFIRPIPTWDEWPEFARETFQAFRTTDVGRKLIIDQNVFIEGTLPMGVVRPLTEVEMDHYREPFLNPVDREPLWRFPNELPIAGEPANIVALVEEYMDWLHQSPVPKLLFWGTPGVLIPPAEAARLAKSLPNCKAVDIGPGLNLLQEDNPDLIGSEIARWLSTLEISG

SEQ ID NO: 1733 - protein, 277 aa, Synthetic construct
MFHYVDVGPRDGTPVLFLHGNPTSSYVWRNIIPHVAPTHRCIAPDLIGMGKSDKPDLGYFFDDHVRFMDAFIEALGLEEVVLVIHDWGSALNFHWAKRNPERVKGIAFMEFIRPIPTWDEWPEFARETFQAFRTTDVGRKLIIDQNVFIEGTLPMGVVRPLTEVEMDHYREPFLNPVDREPLWRFPNELPIAGEPANIVALVEEYMDWLHQSPVPKLLFWGTPGVLIPPAEAARLAKSLPNCKAVDIGPGLNLLQEDNPDLIGSEIARWLSTLEISG

SEQ ID NO: 1734 - protein, 277 aa, Synthetic construct
MFHYVDVGPRDGTPVLFLHGNPTSSYVWRNIIPHVAPTHRCIAPDLIGMGKSDKPDLGYFFDDHVRFMDAFIEALGLEEVVLVIHDWGSALGLHWAKRNPERVKGIAFMEFIRPIPTWDEWPEFARETFQAFRTTDVGRKLIIDQNVFIEGTLPMGVVRPLTEVEMDHYREPFLNPVDREPLWRFPNELPIAGEPANIVALVEEYMDWLHQSPVPKLLFWGTPGVLIPPAEAARLAKSLPNCKAVDIGPGLNLLQEDNPDLIGSEIARWLSTLEISG

SEQ ID NO: 1735 - protein, 277 aa, Synthetic construct
MFHYVDVGPRDGTPVLFLHGNPTSSYVWRNIIPHVAPTHRCIAPDLIGMGKSDKPDLGYFFDDHVRFMDAFIEALGLEEVVLVIHDWGSALGMHWAKRNPERVKGIAFMEFIRPIPTWDEWPEFARETFQAFRTTDVGRKLIIDQNVFIEGTLPMGVVRPLTEVEMDHYREPFLNPVDREPLWRFPNELPIAGEPANIVALVEEYMDWLHQSPVPKLLFWGTPGVLIPPAEAARLAKSLPNCKAVDIGPGLNLLQEDNPDLIGSEIARWLSTLEISG

SEQ ID NO: 1736 - protein, 277 aa, Synthetic construct
MFHYVDVGPRDGTPVLFLHGNPTSSYVWRNIIPHVAPTHRCIAPDLIGMGKSDKPDLGYFFDDHVRFMDAFIEALGLEEVVLVIHDWGSALGYHWAKRNPERVKGIAFMEFIRPIPTWDEWPEFARETFQAFRTTDVGRKLIIDQNVFIEGTLPMGVVRPLTEVEMDHYREPFLNPVDREPLWRFPNELPIAGEPANIVALVEEYMDWLHQSPVPKLLFWGTPGVLIPPAEAARLAKSLPNCKAVDIGPGLNLLQEDNPDLIGSEIARWLSTLEISG

SEQ ID NO: 1737 - protein, 277 aa, Synthetic construct
MFHYVDVGPRDGTPVLFLHGNPTSSYVWRNIIPHVAPTHRCIAPDLIGMGKSDKPDLGYFFDDHVRFMDAFIEALGLEEVVLVIHDWGSALGIHWAKRNPERVKGIAFMEFIRPIPTWDEWPEFARETFQAFRTTDVGRKLIIDQNVFIEGTLPMGVVRPLTEVEMDHYREPFLNPVDREPLWRFPNELPIAGEPANIVALVEEYMDWLHQSPVPKLLFWGTPGVLIPPAEAARLAKSLPNCKAVDIGPGLNLLQEDNPDLIGSEIARWLSTLEISG

SEQ ID NO: 1738 - protein, 277 aa, Synthetic construct
MFHYVDVGPRDGTPVLFLHGNPTSSYVWRNIIPHVAPTHRCIAPDLIGMGKSDKPDLGYFFDDHVRFMDAFIEALGLEEVVLVIHDWGSALGVHWAKRNPERVKGIAFMEFIRPIPTWDEWPEFARETFQAFRTTDVGRKLIIDQNVFIEGTLPMGVVRPLTEVEMDHYREPFLNPVDREPLWRFPNELPIAGEPANIVALVEEYMDWLHQSPVPKLLFWGTPGVLIPPAEAARLAKSLPNCKAVDIGPGLNLLQEDNPDLIGSEIARWLSTLEISG

SEQ ID NO: 1739 - protein, 277 aa, Synthetic construct
MFHYVDVGPRDGTPVLFLHGNPTSSYVWRNIIPHVAPTHRCIAPDLIGMGKSDKPDLGYFFDDHVRFMDAFIEALGLEEVVLVIHDWGSALGAHWAKRNPERVKGIAFMEFIRPIPTWDEWPEFARETFQAFRTTDVGRKLIIDQNVFIEGTLPMGVVRPLTEVEMDHYREPFLNPVDREPLWRFPNELPIAGEPANIVALVEEYMDWLHQSPVPKLLFWGTPGVLIPPAEAARLAKSLPNCKAVDIGPGLNLLQEDNPDLIGSEIARWLSTLEISG

SEQ ID NO: 1740 - protein, 277 aa, Synthetic construct
MFHYVDVGPRDGTPVLFLHGNPTSSYVWRNIIPHVAPTHRCIAPDLIGMGKSDKPDLGYFFDDHVRFMDAFIEALGLEEVVLVIHDWGSALGFNWAKRNPERVKGIAFMEFIRPIPTWDEWPEFARETFQAFRTTDVGRKLIIDQNVFIEGTLPMGVVRPLTEVEMDHYREPFLNPVDREPLWRFPNELPIAGEPANIVALVEEYMDWLHQSPVPKLLFWGTPGVLIPPAEAARLAKSLPNCKAVDIGPGLNLLQEDNPDLIGSEIARWLSTLEISG

SEQ ID NO: 1741 - protein, 277 aa, Synthetic construct
MFHYVDVGPRDGTPVLFLHGNPTSSYVWRNIIPHVAPTHRCIAPDLIGMGKSDKPDLGYFFDDHVRFMDAFIEALGLEEVVLVIHDWGSALGFDWAKRNPERVKGIAFMEFIRPIPTWDEWPEFARETFQAFRTTDVGRKLIIDQNVFIEGTLPMGVVRPLTEVEMDHYREPFLNPVDREPLWRFPNELPIAGEPANIVALVEEYMDWLHQSPVPKLLFWGTPGVLIPPAEAARLAKSLPNCKAVDIGPGLNLLQEDNPDLIGSEIARWLSTLEISG

SEQ ID NO: 1742 - protein, 277 aa, Synthetic construct
MFHYVDVGPRDGTPVLFLHGNPTSSYVWRNIIPHVAPTHRCIAPDLIGMGKSDKPDLGYFFDDHVRFMDAFIEALGLEEVVLVIHDWGSALGFAWAKRNPERVKGIAFMEFIRPIPTWDEWPEFARETFQAFRTTDVGRKLIIDQNVFIEGTLPMGVVRPLTEVEMDHYREPFLNPVDREPLWRFPNELPIAGEPANIVALVEEYMDWLHQSPVPKLLFWGTPGVLIPPAEAARLAKSLPNCKAVDIGPGLNLLQEDNPDLIGSEIARWLSTLEISG

SEQ ID NO: 1743 - protein, 277 aa, Synthetic construct
MFHYVDVGPRDGTPVLFLHGNPTSSYVWRNIIPHVAPTHRCIAPDLIGMGKSDKPDLGYFFDDHVRFMDAFIEALGLEEVVLVIHDWGSALGFYWAKRNPERVKGIAFMEFIRPIPTWDEWPEFARETFQAFRTTDVGRKLIIDQNVFIEGTLPMGVVRPLTEVEMDHYREPFLNPVDREPLWRFPNELPIAGEPANIVALVEEYMDWLHQSPVPKLLFWGTPGVLIPPAEAARLAKSLPNCKAVDIGPGLNLLQEDNPDLIGSEIARWLSTLEISG

SEQ ID NO: 1744 - protein, 277 aa, Synthetic construct
MFHYVDVGPRDGTPVLFLHGNPTSSYVWRNIIPHVAPTHRCIAPDLIGMGKSDKPDLGYFFDDHVRFMDAFIEALGLEEVVLVIHDWGSALGFRWAKRNPERVKGIAFMEFIRPIPTWDEWPEFARETFQAFRTTDVGRKLIIDQNVFIEGTLPMGVVRPLTEVEMDHYREPFLNPVDREPLWRFPNELPIAGEPANIVALVEEYMDWLHQSPVPKLLFWGTPGVLIPPAEAARLAKSLPNCKAVDIGPGLNLLQEDNPDLIGSEIARWLSTLEISG

SEQ ID NO: 1745 - protein, 277 aa, Synthetic construct
MFHYVDVGPRDGTPVLFLHGNPTSSYVWRNIIPHVAPTHRCIAPDLIGMGKSDKPDLGYFFDDHVRFMDAFIEALGLEEVVLVIHDWGSALGFQWAKRNPERVKGIAFMEFIRPIPTWDEWPEFARETFQAFRTTDVGRKLIIDQNVFIEGTLPMGVVRPLTEVEMDHYREPFLNPVDREPLWRFPNELPIAGEPANIVALVEEYMDWLHQSPVPKLLFWGTPGVLIPPAEAARLAKSLPNCKAVDIGPGLNLLQEDNPDLIGSEIARWLSTLEISG

SEQ ID NO: 1746 - protein, 277 aa, Synthetic construct
MFHYVDVGPRDGTPVLFLHGNPTSSYVWRNIIPHVAPTHRCIAPDLIGMGKSDKPDLGYFFDDHVRFMDAFIEALGLEEVVLVIHDWGSALGFHYAKRNPERVKGIAFMEFIRPIPTWDEWPEFARETFQAFRTTDVGRKLIIDQNVFIEGTLPMGVVRPLTEVEMDHYREPFLNPVDREPLWRFPNELPIAGEPANIVALVEEYMDWLHQSPVPKLLFWGTPGVLIPPAEAARLAKSLPNCKAVDIGPGLNLLQEDNPDLIGSEIARWLSTLEISG

SEQ ID NO: 1747 - protein, 277 aa, Synthetic construct
MFHYVDVGPRDGTPVLFLHGNPTSSYVWRNIIPHVAPTHRCIAPDLIGMGKSDKPDLGYFFDDHVRFMDAFIEALGLEEVVLVIHDWGSALGFHFAKRNPERVKGIAFMEFIRPIPTWDEWPEFARETFQAFRTTDVGRKLIIDQNVFIEGTLPMGVVRPLTEVEMDHYREPFLNPVDREPLWRFPNELPIAGEPANIVALVEEYMDWLHQSPVPKLLFWGTPGVLIPPAEAARLAKSLPNCKAVDIGPGLNLLQEDNPDLIGSEIARWLSTLEISG

SEQ ID NO: 1748 - protein, 277 aa, Synthetic construct
MFHYVDVGPRDGTPVLFLHGNPTSSYVWRNIIPHVAPTHRCIAPDLIGMGKSDKPDLGYFFDDHVRFMDAFIEALGLEEVVLVIHDWGSALGFHLAKRNPERVKGIAFMEFIRPIPTWDEWPEFARETFQAFRTTDVGRKLIIDQNVFIEGTLPMGVVRPLTEVEMDHYREPFLNPVDREPLWRFPNELPIAGEPANIVALVEEYMDWLHQSPVPKLLFWGTPGVLIPPAEAARLAKSLPNCKAVDIGPGLNLLQEDNPDLIGSEIARWLSTLEISG

SEQ ID NO: 1749 - protein, 277 aa, Synthetic construct
MFHYVDVGPRDGTPVLFLHGNPTSSYVWRNIIPHVAPTHRCIAPDLIGMGKSDKPDLGYFFDDHVRFMDAFIEALGLEEVVLVIHDWGSALGFHVAKRNPERVKGIAFMEFIRPIPTWDEWPEFARETFQAFRTTDVGRKLIIDQNVFIEGTLPMGVVRPLTEVEMDHYREPFLNPVDREPLWRFPNELPIAGEPANIVALVEEYMDWLHQSPVPKLLFWGTPGVLIPPAEAARLAKSLPNCKAVDIGPGLNLLQEDNPDLIGSEIARWLSTLEISG

SEQ ID NO: 1750 - protein, 277 aa, Synthetic construct
MFHYVDVGPRDGTPVLFLHGNPTSSYVWRNIIPHVAPTHRCIAPDLIGMGKSDKPDLGYFFDDHVRFMDAFIEALGLEEVVLVIHDWGSALGFHIAKRNPERVKGIAFMEFIRPIPTWDEWPEFARETFQAFRTTDVGRKLIIDQNVFIEGTLPMGVVRPLTEVEMDHYREPFLNPVDREPLWRFPNELPIAGEPANIVALVEEYMDWLHQSPVPKLLFWGTPGVLIPPAEAARLAKSLPNCKAVDIGPGLNLLQEDNPDLIGSEIARWLSTLEISG

SEQ ID NO: 1751 - protein, 277 aa, Synthetic construct
MFHYVDVGPRDGTPVLFLHGNPTSSYVWRNIIPHVAPTHRCIAPDLIGMGKSDKPDLGYFFDDHVRFMDAFIEALGLEEVVLVIHDWGSALGFHHAKRNPERVKGIAFMEFIRPIPTWDEWPEFARETFQAFRTTDVGRKLIIDQNVFIEGTLPMGVVRPLTEVEMDHYREPFLNPVDREPLWRFPNELPIAGEPANIVALVEEYMDWLHQSPVPKLLFWGTPGVLIPPAEAARLAKSLPNCKAVDIGPGLNLLQEDNPDLIGSEIARWLSTLEISG

SEQ ID NO: 1752 - protein, 277 aa, Synthetic construct
MFHYVDVGPRDGTPVLFLHGNPTSSYVWRNIIPHVAPTHRCIAPDLIGMGKSDKPDLGYFFDDHVRFMDAFIEALGLEEVVLVIHDWGSALGFHWVKRNPERVKGIAFMEFIRPIPTWDEWPEFARETFQAFRTTDVGRKLIIDQNVFIEGTLPMGVVRPLTEVEMDHYREPFLNPVDREPLWRFPNELPIAGEPANIVALVEEYMDWLHQSPVPKLLFWGTPGVLIPPAEAARLAKSLPNCKAVDIGPGLNLLQEDNPDLIGSEIARWLSTLEISG

SEQ ID NO: 1753 - protein, 277 aa, Synthetic construct
MFHYVDVGPRDGTPVLFLHGNPTSSYVWRNIIPHVAPTHRCIAPDLIGMGKSDKPDLGYFFDDHVRFMDAFIEALGLEEVVLVIHDWGSALGFHWSKRNPERVKGIAFMEFIRPIPTWDEWPEFARETFQAFRTTDVGRKLIIDQNVFIEGTLPMGVVRPLTEVEMDHYREPFLNPVDREPLWRFPNELPIAGEPANIVALVEEYMDWLHQSPVPKLLFWGTPGVLIPPAEAARLAKSLPNCKAVDIGPGLNLLQEDNPDLIGSEIARWLSTLEISG

SEQ ID NO: 1754 - protein, 277 aa, Synthetic construct
MFHYVDVGPRDGTPVLFLHGNPTSSYVWRNIIPHVAPTHRCIAPDLIGMGKSDKPDLGYFFDDHVRFMDAFIEALGLEEVVLVIHDWGSALGFHWGKRNPERVKGIAFMEFIRPIPTWDEWPEFARETFQAFRTTDVGRKLIIDQNVFIEGTLPMGVVRPLTEVEMDHYREPFLNPVDREPLWRFPNELPIAGEPANIVALVEEYMDWLHQSPVPKLLFWGTPGVLIPPAEAARLAKSLPNCKAVDIGPGLNLLQEDNPDLIGSEIARWLSTLEISG

SEQ ID NO: 1755 - protein, 277 aa, Synthetic construct
MFHYVDVGPRDGTPVLFLHGNPTSSYVWRNIIPHVAPTHRCIAPDLIGMGKSDKPDLGYFFDDHVRFMDAFIEALGLEEVVLVIHDWGSALGFHWTKRNPERVKGIAFMEFIRPIPTWDEWPEFARETFQAFRTTDVGRKLIIDQNVFIEGTLPMGVVRPLTEVEMDHYREPFLNPVDREPLWRFPNELPIAGEPANIVALVEEYMDWLHQSPVPKLLFWGTPGVLIPPAEAARLAKSLPNCKAVDIGPGLNLLQEDNPDLIGSEIARWLSTLEISG

SEQ ID NO: 1756 - protein, 277 aa, Synthetic construct
MFHYVDVGPRDGTPVLFLHGNPTSSYVWRNIIPHVAPTHRCIAPDLIGMGKSDKPDLGYFFDDHVRFMDAFIEALGLEEVVLVIHDWGSALGFHWCKRNPERVKGIAFMEFIRPIPTWDEWPEFARETFQAFRTTDVGRKLIIDQNVFIEGTLPMGVVRPLTEVEMDHYREPFLNPVDREPLWRFPNELPIAGEPANIVALVEEYMDWLHQSPVPKLLFWGTPGVLIPPAEAARLAKSLPNCKAVDIGPGLNLLQEDNPDLIGSEIARWLSTLEISG

SEQ ID NO: 1757 - protein, 277 aa, Synthetic construct
MFHYVDVGPRDGTPVLFLHGNPTSSYVWRNIIPHVAPTHRCIAPDLIGMGKSDKPDLGYFFDDHVRFMDAFIEALGLEEVVLVIHDWGSALGFHWLKRNPERVKGIAFMEFIRPIPTWDEWPEFARETFQAFRTTDVGRKLIIDQNVFIEGTLPMGVVRPLTEVEMDHYREPFLNPVDREPLWRFPNELPIAGEPANIVALVEEYMDWLHQSPVPKLLFWGTPGVLIPPAEAARLAKSLPNCKAVDIGPGLNLLQEDNPDLIGSEIARWLSTLEISG

SEQ ID NO: 1758 - protein, 277 aa, Synthetic construct
MFHYVDVGPRDGTPVLFLHGNPTSSYVWRNIIPHVAPTHRCIAPDLIGMGKSDKPDLGYFFDDHVRFMDAFIEALGLEEVVLVIHDWGSALGFHWARRNPERVKGIAFMEFIRPIPTWDEWPEFARETFQAFRTTDVGRKLIIDQNVFIEGTLPMGVVRPLTEVEMDHYREPFLNPVDREPLWRFPNELPIAGEPANIVALVEEYMDWLHQSPVPKLLFWGTPGVLIPPAEAARLAKSLPNCKAVDIGPGLNLLQEDNPDLIGSEIARWLSTLEISG

SEQ ID NO: 1759 - protein, 277 aa, Synthetic construct
MFHYVDVGPRDGTPVLFLHGNPTSSYVWRNIIPHVAPTHRCIAPDLIGMGKSDKPDLGYFFDDHVRFMDAFIEALGLEEVVLVIHDWGSALGFHWAARNPERVKGIAFMEFIRPIPTWDEWPEFARETFQAFRTTDVGRKLIIDQNVFIEGTLPMGVVRPLTEVEMDHYREPFLNPVDREPLWRFPNELPIAGEPANIVALVEEYMDWLHQSPVPKLLFWGTPGVLIPPAEAARLAKSLPNCKAVDIGPGLNLLQEDNPDLIGSEIARWLSTLEISG

SEQ ID NO: 1760 - protein, 277 aa, Synthetic construct
MFHYVDVGPRDGTPVLFLHGNPTSSYVWRNIIPHVAPTHRCIAPDLIGMGKSDKPDLGYFFDDHVRFMDAFIEALGLEEVVLVIHDWGSALGFHWANRNPERVKGIAFMEFIRPIPTWDEWPEFARETFQAFRTTDVGRKLIIDQNVFIEGTLPMGVVRPLTEVEMDHYREPFLNPVDREPLWRFPNELPIAGEPANIVALVEEYMDWLHQSPVPKLLFWGTPGVLIPPAEAARLAKSLPNCKAVDIGPGLNLLQEDNPDLIGSEIARWLSTLEISG

SEQ ID NO: 1761 - protein, 277 aa, Synthetic construct
MFHYVDVGPRDGTPVLFLHGNPTSSYVWRNIIPHVAPTHRCIAPDLIGMGKSDKPDLGYFFDDHVRFMDAFIEALGLEEVVLVIHDWGSALGFHWAHRNPERVKGIAFMEFIRPIPTWDEWPEFARETFQAFRTTDVGRKLIIDQNVFIEGTLPMGVVRPLTEVEMDHYREPFLNPVDREPLWRFPNELPIAGEPANIVALVEEYMDWLHQSPVPKLLFWGTPGVLIPPAEAARLAKSLPNCKAVDIGPGLNLLQEDNPDLIGSEIARWLSTLEISG

SEQ ID NO: 1762 - protein, 277 aa, Synthetic construct
MFHYVDVGPRDGTPVLFLHGNPTSSYVWRNIIPHVAPTHRCIAPDLIGMGKSDKPDLGYFFDDHVRFMDAFIEALGLEEVVLVIHDWGSALGFHWASRNPERVKGIAFMEFIRPIPTWDEWPEFARETFQAFRTTDVGRKLIIDQNVFIEGTLPMGVVRPLTEVEMDHYREPFLNPVDREPLWRFPNELPIAGEPANIVALVEEYMDWLHQSPVPKLLFWGTPGVLIPPAEAARLAKSLPNCKAVDIGPGLNLLQEDNPDLIGSEIARWLSTLEISG

SEQ ID NO: 1763 - protein, 277 aa, Synthetic construct
MFHYVDVGPRDGTPVLFLHGNPTSSYVWRNIIPHVAPTHRCIAPDLIGMGKSDKPDLGYFFDDHVRFMDAFIEALGLEEVVLVIHDWGSALGFHWAQRNPERVKGIAFMEFIRPIPTWDEWPEFARETFQAFRTTDVGRKLIIDQNVFIEGTLPMGVVRPLTEVEMDHYREPFLNPVDREPLWRFPNELPIAGEPANIVALVEEYMDWLHQSPVPKLLFWGTPGVLIPPAEAARLAKSLPNCKAVDIGPGLNLLQEDNPDLIGSEIARWLSTLEISG

SEQ ID NO: 1764 - protein, 277 aa, Synthetic construct
MFHYVDVGPRDGTPVLFLHGNPTSSYVWRNIIPHVAPTHRCIAPDLIGMGKSDKPDLGYFFDDHVRFMDAFIEALGLEEVVLVIHDWGSALGFHWAKKNPERVKGIAFMEFIRPIPTWDEWPEFARETFQAFRTTDVGRKLIIDQNVFIEGTLPMGVVRPLTEVEMDHYREPFLNPVDREPLWRFPNELPIAGEPANIVALVEEYMDWLHQSPVPKLLFWGTPGVLIPPAEAARLAKSLPNCKAVDIGPGLNLLQEDNPDLIGSEIARWLSTLEISG

SEQ ID NO: 1765 - protein, 277 aa, Synthetic construct
MFHYVDVGPRDGTPVLFLHGNPTSSYVWRNIIPHVAPTHRCIAPDLIGMGKSDKPDLGYFFDDHVRFMDAFIEALGLEEVVLVIHDWGSALGFHWAKQNPERVKGIAFMEFIRPIPTWDEWPEFARETFQAFRTTDVGRKLIIDQNVFIEGTLPMGVVRPLTEVEMDHYREPFLNPVDREPLWRFPNELPIAGEPANIVALVEEYMDWLHQSPVPKLLFWGTPGVLIPPAEAARLAKSLPNCKAVDIGPGLNLLQEDNPDLIGSEIARWLSTLEISG

SEQ ID NO: 1766 - protein, 277 aa, Synthetic construct
MFHYVDVGPRDGTPVLFLHGNPTSSYVWRNIIPHVAPTHRCIAPDLIGMGKSDKPDLGYFFDDHVRFMDAFIEALGLEEVVLVIHDWGSALGFHWAKANPERVKGIAFMEFIRPIPTWDEWPEFARETFQAFRTTDVGRKLIIDQNVFIEGTLPMGVVRPLTEVEMDHYREPFLNPVDREPLWRFPNELPIAGEPANIVALVEEYMDWLHQSPVPKLLFWGTPGVLIPPAEAARLAKSLPNCKAVDIGPGLNLLQEDNPDLIGSEIARWLSTLEISG

SEQ ID NO: 1767 - protein, 277 aa, Synthetic construct
MFHYVDVGPRDGTPVLFLHGNPTSSYVWRNIIPHVAPTHRCIAPDLIGMGKSDKPDLGYFFDDHVRFMDAFIEALGLEEVVLVIHDWGSALGFHWAKTNPERVKGIAFMEFIRPIPTWDEWPEFARETFQAFRTTDVGRKLIIDQNVFIEGTLPMGVVRPLTEVEMDHYREPFLNPVDREPLWRFPNELPIAGEPANIVALVEEYMDWLHQSPVPKLLFWGTPGVLIPPAEAARLAKSLPNCKAVDIGPGLNLLQEDNPDLIGSEIARWLSTLEISG

SEQ ID NO: 1768 - protein, 277 aa, Synthetic construct
MFHYVDVGPRDGTPVLFLHGNPTSSYVWRNIIPHVAPTHRCIAPDLIGMGKSDKPDLGYFFDDHVRFMDAFIEALGLEEVVLVIHDWGSALGFHWAKHNPERVKGIAFMEFIRPIPTWDEWPEFARETFQAFRTTDVGRKLIIDQNVFIEGTLPMGVVRPLTEVEMDHYREPFLNPVDREPLWRFPNELPIAGEPANIVALVEEYMDWLHQSPVPKLLFWGTPGVLIPPAEAARLAKSLPNCKAVDIGPGLNLLQEDNPDLIGSEIARWLSTLEISG

SEQ ID NO: 1769 - protein, 277 aa, Synthetic construct
MFHYVDVGPRDGTPVLFLHGNPTSSYVWRNIIPHVAPTHRCIAPDLIGMGKSDKPDLGYFFDDHVRFMDAFIEALGLEEVVLVIHDWGSALGFHWAKSNPERVKGIAFMEFIRPIPTWDEWPEFARETFQAFRTTDVGRKLIIDQNVFIEGTLPMGVVRPLTEVEMDHYREPFLNPVDREPLWRFPNELPIAGEPANIVALVEEYMDWLHQSPVPKLLFWGTPGVLIPPAEAARLAKSLPNCKAVDIGPGLNLLQEDNPDLIGSEIARWLSTLEISG

SEQ ID NO: 1770 - protein, 277 aa, Synthetic construct
MFHYVDVGPRDGTPVLFLHGNPTSSYVWRNIIPHVAPTHRCIAPDLIGMGKSDKPDLGYFFDDHVRFMDAFIEALGLEEVVLVIHDWGSALGFHWAKRHPERVKGIAFMEFIRPIPTWDEWPEFARETFQAFRTTDVGRKLIIDQNVFIEGTLPMGVVRPLTEVEMDHYREPFLNPVDREPLWRFPNELPIAGEPANIVALVEEYMDWLHQSPVPKLLFWGTPGVLIPPAEAARLAKSLPNCKAVDIGPGLNLLQEDNPDLIGSEIARWLSTLEISG

SEQ ID NO: 1771 - protein, 277 aa, Synthetic construct
MFHYVDVGPRDGTPVLFLHGNPTSSYVWRNIIPHVAPTHRCIAPDLIGMGKSDKPDLGYFFDDHVRFMDAFIEALGLEEVVLVIHDWGSALGFHWAKRYPERVKGIAFMEFIRPIPTWDEWPEFARETFQAFRTTDVGRKLIIDQNVFIEGTLPMGVVRPLTEVEMDHYREPFLNPVDREPLWRFPNELPIAGEPANIVALVEEYMDWLHQSPVPKLLFWGTPGVLIPPAEAARLAKSLPNCKAVDIGPGLNLLQEDNPDLIGSEIARWLSTLEISG

SEQ ID NO: 1772 - protein, 277 aa, Synthetic construct
MFHYVDVGPRDGTPVLFLHGNPTSSYVWRNIIPHVAPTHRCIAPDLIGMGKSDKPDLGYFFDDHVRFMDAFIEALGLEEVVLVIHDWGSALGFHWAKRRPERVKGIAFMEFIRPIPTWDEWPEFARETFQAFRTTDVGRKLIIDQNVFIEGTLPMGVVRPLTEVEMDHYREPFLNPVDREPLWRFPNELPIAGEPANIVALVEEYMDWLHQSPVPKLLFWGTPGVLIPPAEAARLAKSLPNCKAVDIGPGLNLLQEDNPDLIGSEIARWLSTLEISG

SEQ ID NO: 1773 - protein, 277 aa, Synthetic construct
MFHYVDVGPRDGTPVLFLHGNPTSSYVWRNIIPHVAPTHRCIAPDLIGMGKSDKPDLGYFFDDHVRFMDAFIEALGLEEVVLVIHDWGSALGFHWAKRFPERVKGIAFMEFIRPIPTWDEWPEFARETFQAFRTTDVGRKLIIDQNVFIEGTLPMGVVRPLTEVEMDHYREPFLNPVDREPLWRFPNELPIAGEPANIVALVEEYMDWLHQSPVPKLLFWGTPGVLIPPAEAARLAKSLPNCKAVDIGPGLNLLQEDNPDLIGSEIARWLSTLEISG

SEQ ID NO: 1774 - protein, 277 aa, Synthetic construct
MFHYVDVGPRDGTPVLFLHGNPTSSYVWRNIIPHVAPTHRCIAPDLIGMGKSDKPDLGYFFDDHVRFMDAFIEALGLEEVVLVIHDWGSALGFHWAKRQPERVKGIAFMEFIRPIPTWDEWPEFARETFQAFRTTDVGRKLIIDQNVFIEGTLPMGVVRPLTEVEMDHYREPFLNPVDREPLWRFPNELPIAGEPANIVALVEEYMDWLHQSPVPKLLFWGTPGVLIPPAEAARLAKSLPNCKAVDIGPGLNLLQEDNPDLIGSEIARWLSTLEISG

SEQ ID NO: 1775 - protein, 277 aa, Synthetic construct
MFHYVDVGPRDGTPVLFLHGNPTSSYVWRNIIPHVAPTHRCIAPDLIGMGKSDKPDLGYFFDDHVRFMDAFIEALGLEEVVLVIHDWGSALGFHWAKRSPERVKGIAFMEFIRPIPTWDEWPEFARETFQAFRTTDVGRKLIIDQNVFIEGTLPMGVVRPLTEVEMDHYREPFLNPVDREPLWRFPNELPIAGEPANIVALVEEYMDWLHQSPVPKLLFWGTPGVLIPPAEAARLAKSLPNCKAVDIGPGLNLLQEDNPDLIGSEIARWLSTLEISG

SEQ ID NO: 1776 - protein, 277 aa, Synthetic construct
MFHYVDVGPRDGTPVLFLHGNPTSSYVWRNIIPHVAPTHRCIAPDLIGMGKSDKPDLGYFFDDHVRFMDAFIEALGLEEVVLVIHDWGSALGFHWAKRNAERVKGIAFMEFIRPIPTWDEWPEFARETFQAFRTTDVGRKLIIDQNVFIEGTLPMGVVRPLTEVEMDHYREPFLNPVDREPLWRFPNELPIAGEPANIVALVEEYMDWLHQSPVPKLLFWGTPGVLIPPAEAARLAKSLPNCKAVDIGPGLNLLQEDNPDLIGSEIARWLSTLEISG

SEQ ID NO: 1777 - protein, 277 aa, Synthetic construct
MFHYVDVGPRDGTPVLFLHGNPTSSYVWRNIIPHVAPTHRCIAPDLIGMGKSDKPDLGYFFDDHVRFMDAFIEALGLEEVVLVIHDWGSALGFHWAKRNRERVKGIAFMEFIRPIPTWDEWPEFARETFQAFRTTDVGRKLIIDQNVFIEGTLPMGVVRPLTEVEMDHYREPFLNPVDREPLWRFPNELPIAGEPANIVALVEEYMDWLHQSPVPKLLFWGTPGVLIPPAEAARLAKSLPNCKAVDIGPGLNLLQEDNPDLIGSEIARWLSTLEISG

SEQ ID NO: 1778 - protein, 277 aa, Synthetic construct
MFHYVDVGPRDGTPVLFLHGNPTSSYVWRNIIPHVAPTHRCIAPDLIGMGKSDKPDLGYFFDDHVRFMDAFIEALGLEEVVLVIHDWGSALGFHWAKRNQERVKGIAFMEFIRPIPTWDEWPEFARETFQAFRTTDVGRKLIIDQNVFIEGTLPMGVVRPLTEVEMDHYREPFLNPVDREPLWRFPNELPIAGEPANIVALVEEYMDWLHQSPVPKLLFWGTPGVLIPPAEAARLAKSLPNCKAVDIGPGLNLLQEDNPDLIGSEIARWLSTLEISG

SEQ ID NO: 1779 - protein, 277 aa, Synthetic construct
MFHYVDVGPRDGTPVLFLHGNPTSSYVWRNIIPHVAPTHRCIAPDLIGMGKSDKPDLGYFFDDHVRFMDAFIEALGLEEVVLVIHDWGSALGFHWAKRNSERVKGIAFMEFIRPIPTWDEWPEFARETFQAFRTTDVGRKLIIDQNVFIEGTLPMGVVRPLTEVEMDHYREPFLNPVDREPLWRFPNELPIAGEPANIVALVEEYMDWLHQSPVPKLLFWGTPGVLIPPAEAARLAKSLPNCKAVDIGPGLNLLQEDNPDLIGSEIARWLSTLEISG

SEQ ID NO: 1780 - protein, 277 aa, Synthetic construct
MFHYVDVGPRDGTPVLFLHGNPTSSYVWRNIIPHVAPTHRCIAPDLIGMGKSDKPDLGYFFDDHVRFMDAFIEALGLEEVVLVIHDWGSALGFHWAKRNLERVKGIAFMEFIRPIPTWDEWPEFARETFQAFRTTDVGRKLIIDQNVFIEGTLPMGVVRPLTEVEMDHYREPFLNPVDREPLWRFPNELPIAGEPANIVALVEEYMDWLHQSPVPKLLFWGTPGVLIPPAEAARLAKSLPNCKAVDIGPGLNLLQEDNPDLIGSEIARWLSTLEISG

SEQ ID NO: 1781 - protein, 277 aa, Synthetic construct
MFHYVDVGPRDGTPVLFLHGNPTSSYVWRNIIPHVAPTHRCIAPDLIGMGKSDKPDLGYFFDDHVRFMDAFIEALGLEEVVLVIHDWGSALGFHWAKRNTERVKGIAFMEFIRPIPTWDEWPEFARETFQAFRTTDVGRKLIIDQNVFIEGTLPMGVVRPLTEVEMDHYREPFLNPVDREPLWRFPNELPIAGEPANIVALVEEYMDWLHQSPVPKLLFWGTPGVLIPPAEAARLAKSLPNCKAVDIGPGLNLLQEDNPDLIGSEIARWLSTLEISG

SEQ ID NO: 1782 - protein, 277 aa, Synthetic construct
MFHYVDVGPRDGTPVLFLHGNPTSSYVWRNIIPHVAPTHRCIAPDLIGMGKSDKPDLGYFFDDHVRFMDAFIEALGLEEVVLVIHDWGSALGFHWAKRNPDRVKGIAFMEFIRPIPTWDEWPEFARETFQAFRTTDVGRKLIIDQNVFIEGTLPMGVVRPLTEVEMDHYREPFLNPVDREPLWRFPNELPIAGEPANIVALVEEYMDWLHQSPVPKLLFWGTPGVLIPPAEAARLAKSLPNCKAVDIGPGLNLLQEDNPDLIGSEIARWLSTLEISG

SEQ ID NO: 1783 - protein, 277 aa, Synthetic construct
MFHYVDVGPRDGTPVLFLHGNPTSSYVWRNIIPHVAPTHRCIAPDLIGMGKSDKPDLGYFFDDHVRFMDAFIEALGLEEVVLVIHDWGSALGFHWAKRNPGRVKGIAFMEFIRPIPTWDEWPEFARETFQAFRTTDVGRKLIIDQNVFIEGTLPMGVVRPLTEVEMDHYREPFLNPVDREPLWRFPNELPIAGEPANIVALVEEYMDWLHQSPVPKLLFWGTPGVLIPPAEAARLAKSLPNCKAVDIGPGLNLLQEDNPDLIGSEIARWLSTLEISG

SEQ ID NO: 1784 - protein, 277 aa, Synthetic construct
MFHYVDVGPRDGTPVLFLHGNPTSSYVWRNIIPHVAPTHRCIAPDLIGMGKSDKPDLGYFFDDHVRFMDAFIEALGLEEVVLVIHDWGSALGFHWAKRNPARVKGIAFMEFIRPIPTWDEWPEFARETFQAFRTTDVGRKLIIDQNVFIEGTLPMGVVRPLTEVEMDHYREPFLNPVDREPLWRFPNELPIAGEPANIVALVEEYMDWLHQSPVPKLLFWGTPGVLIPPAEAARLAKSLPNCKAVDIGPGLNLLQEDNPDLIGSEIARWLSTLEISG

SEQ ID NO: 1785 - protein, 277 aa, Synthetic construct
MFHYVDVGPRDGTPVLFLHGNPTSSYVWRNIIPHVAPTHRCIAPDLIGMGKSDKPDLGYFFDDHVRFMDAFIEALGLEEVVLVIHDWGSALGFHWAKRNPQRVKGIAFMEFIRPIPTWDEWPEFARETFQAFRTTDVGRKLIIDQNVFIEGTLPMGVVRPLTEVEMDHYREPFLNPVDREPLWRFPNELPIAGEPANIVALVEEYMDWLHQSPVPKLLFWGTPGVLIPPAEAARLAKSLPNCKAVDIGPGLNLLQEDNPDLIGSEIARWLSTLEISG

SEQ ID NO: 1786 - protein, 277 aa, Synthetic construct
MFHYVDVGPRDGTPVLFLHGNPTSSYVWRNIIPHVAPTHRCIAPDLIGMGKSDKPDLGYFFDDHVRFMDAFIEALGLEEVVLVIHDWGSALGFHWAKRNPSRVKGIAFMEFIRPIPTWDEWPEFARETFQAFRTTDVGRKLIIDQNVFIEGTLPMGVVRPLTEVEMDHYREPFLNPVDREPLWRFPNELPIAGEPANIVALVEEYMDWLHQSPVPKLLFWGTPGVLIPPAEAARLAKSLPNCKAVDIGPGLNLLQEDNPDLIGSEIARWLSTLEISG

SEQ ID NO: 1787 - protein, 277 aa, Synthetic construct
MFHYVDVGPRDGTPVLFLHGNPTSSYVWRNIIPHVAPTHRCIAPDLIGMGKSDKPDLGYFFDDHVRFMDAFIEALGLEEVVLVIHDWGSALGFHWAKRNPNRVKGIAFMEFIRPIPTWDEWPEFARETFQAFRTTDVGRKLIIDQNVFIEGTLPMGVVRPLTEVEMDHYREPFLNPVDREPLWRFPNELPIAGEPANIVALVEEYMDWLHQSPVPKLLFWGTPGVLIPPAEAARLAKSLPNCKAVDIGPGLNLLQEDNPDLIGSEIARWLSTLEISG

SEQ ID NO: 1788 - protein, 277 aa, Synthetic construct
MFHYVDVGPRDGTPVLFLHGNPTSSYVWRNIIPHVAPTHRCIAPDLIGMGKSDKPDLGYFFDDHVRFMDAFIEALGLEEVVLVIHDWGSALGFHWAKRNPEKVKGIAFMEFIRPIPTWDEWPEFARETFQAFRTTDVGRKLIIDQNVFIEGTLPMGVVRPLTEVEMDHYREPFLNPVDREPLWRFPNELPIAGEPANIVALVEEYMDWLHQSPVPKLLFWGTPGVLIPPAEAARLAKSLPNCKAVDIGPGLNLLQEDNPDLIGSEIARWLSTLEISG

SEQ ID NO: 1789 - protein, 277 aa, Synthetic construct
MFHYVDVGPRDGTPVLFLHGNPTSSYVWRNIIPHVAPTHRCIAPDLIGMGKSDKPDLGYFFDDHVRFMDAFIEALGLEEVVLVIHDWGSALGFHWAKRNPEAVKGIAFMEFIRPIPTWDEWPEFARETFQAFRTTDVGRKLIIDQNVFIEGTLPMGVVRPLTEVEMDHYREPFLNPVDREPLWRFPNELPIAGEPANIVALVEEYMDWLHQSPVPKLLFWGTPGVLIPPAEAARLAKSLPNCKAVDIGPGLNLLQEDNPDLIGSEIARWLSTLEISG

SEQ ID NO: 1790 - protein, 277 aa, Synthetic construct
MFHYVDVGPRDGTPVLFLHGNPTSSYVWRNIIPHVAPTHRCIAPDLIGMGKSDKPDLGYFFDDHVRFMDAFIEALGLEEVVLVIHDWGSALGFHWAKRNPELVKGIAFMEFIRPIPTWDEWPEFARETFQAFRTTDVGRKLIIDQNVFIEGTLPMGVVRPLTEVEMDHYREPFLNPVDREPLWRFPNELPIAGEPANIVALVEEYMDWLHQSPVPKLLFWGTPGVLIPPAEAARLAKSLPNCKAVDIGPGLNLLQEDNPDLIGSEIARWLSTLEISG

SEQ ID NO: 1791 - protein, 277 aa, Synthetic construct
MFHYVDVGPRDGTPVLFLHGNPTSSYVWRNIIPHVAPTHRCIAPDLIGMGKSDKPDLGYFFDDHVRFMDAFIEALGLEEVVLVIHDWGSALGFHWAKRNPEQVKGIAFMEFIRPIPTWDEWPEFARETFQAFRTTDVGRKLIIDQNVFIEGTLPMGVVRPLTEVEMDHYREPFLNPVDREPLWRFPNELPIAGEPANIVALVEEYMDWLHQSPVPKLLFWGTPGVLIPPAEAARLAKSLPNCKAVDIGPGLNLLQEDNPDLIGSEIARWLSTLEISG

SEQ ID NO: 1792 - protein, 277 aa, Synthetic construct
MFHYVDVGPRDGTPVLFLHGNPTSSYVWRNIIPHVAPTHRCIAPDLIGMGKSDKPDLGYFFDDHVRFMDAFIEALGLEEVVLVIHDWGSALGFHWAKRNPENVKGIAFMEFIRPIPTWDEWPEFARETFQAFRTTDVGRKLIIDQNVFIEGTLPMGVVRPLTEVEMDHYREPFLNPVDREPLWRFPNELPIAGEPANIVALVEEYMDWLHQSPVPKLLFWGTPGVLIPPAEAARLAKSLPNCKAVDIGPGLNLLQEDNPDLIGSEIARWLSTLEISG

SEQ ID NO: 1793 - protein, 277 aa, Synthetic construct
MFHYVDVGPRDGTPVLFLHGNPTSSYVWRNIIPHVAPTHRCIAPDLIGMGKSDKPDLGYFFDDHVRFMDAFIEALGLEEVVLVIHDWGSALGFHWAKRNPESVKGIAFMEFIRPIPTWDEWPEFARETFQAFRTTDVGRKLIIDQNVFIEGTLPMGVVRPLTEVEMDHYREPFLNPVDREPLWRFPNELPIAGEPANIVALVEEYMDWLHQSPVPKLLFWGTPGVLIPPAEAARLAKSLPNCKAVDIGPGLNLLQEDNPDLIGSEIARWLSTLEISG

SEQ ID NO: 1794 - protein, 277 aa, Synthetic construct
MFHYVDVGPRDGTPVLFLHGNPTSSYVWRNIIPHVAPTHRCIAPDLIGMGKSDKPDLGYFFDDHVRFMDAFIEALGLEEVVLVIHDWGSALGFHWAKRNPERIKGIAFMEFIRPIPTWDEWPEFARETFQAFRTTDVGRKLIIDQNVFIEGTLPMGVVRPLTEVEMDHYREPFLNPVDREPLWRFPNELPIAGEPANIVALVEEYMDWLHQSPVPKLLFWGTPGVLIPPAEAARLAKSLPNCKAVDIGPGLNLLQEDNPDLIGSEIARWLSTLEISG

SEQ ID NO: 1795 - protein, 277 aa, Synthetic construct
MFHYVDVGPRDGTPVLFLHGNPTSSYVWRNIIPHVAPTHRCIAPDLIGMGKSDKPDLGYFFDDHVRFMDAFIEALGLEEVVLVIHDWGSALGFHWAKRNPERLKGIAFMEFIRPIPTWDEWPEFARETFQAFRTTDVGRKLIIDQNVFIEGTLPMGVVRPLTEVEMDHYREPFLNPVDREPLWRFPNELPIAGEPANIVALVEEYMDWLHQSPVPKLLFWGTPGVLIPPAEAARLAKSLPNCKAVDIGPGLNLLQEDNPDLIGSEIARWLSTLEISG

SEQ ID NO: 1796 - protein, 277 aa, Synthetic construct
MFHYVDVGPRDGTPVLFLHGNPTSSYVWRNIIPHVAPTHRCIAPDLIGMGKSDKPDLGYFFDDHVRFMDAFIEALGLEEVVLVIHDWGSALGFHWAKRNPERTKGIAFMEFIRPIPTWDEWPEFARETFQAFRTTDVGRKLIIDQNVFIEGTLPMGVVRPLTEVEMDHYREPFLNPVDREPLWRFPNELPIAGEPANIVALVEEYMDWLHQSPVPKLLFWGTPGVLIPPAEAARLAKSLPNCKAVDIGPGLNLLQEDNPDLIGSEIARWLSTLEISG

SEQ ID NO: 1797 - protein, 277 aa, Synthetic construct
MFHYVDVGPRDGTPVLFLHGNPTSSYVWRNIIPHVAPTHRCIAPDLIGMGKSDKPDLGYFFDDHVRFMDAFIEALGLEEVVLVIHDWGSALGFHWAKRNPERMKGIAFMEFIRPIPTWDEWPEFARETFQAFRTTDVGRKLIIDQNVFIEGTLPMGVVRPLTEVEMDHYREPFLNPVDREPLWRFPNELPIAGEPANIVALVEEYMDWLHQSPVPKLLFWGTPGVLIPPAEAARLAKSLPNCKAVDIGPGLNLLQEDNPDLIGSEIARWLSTLEISG

SEQ ID NO: 1798 - protein, 277 aa, Synthetic construct
MFHYVDVGPRDGTPVLFLHGNPTSSYVWRNIIPHVAPTHRCIAPDLIGMGKSDKPDLGYFFDDHVRFMDAFIEALGLEEVVLVIHDWGSALGFHWAKRNPERAKGIAFMEFIRPIPTWDEWPEFARETFQAFRTTDVGRKLIIDQNVFIEGTLPMGVVRPLTEVEMDHYREPFLNPVDREPLWRFPNELPIAGEPANIVALVEEYMDWLHQSPVPKLLFWGTPGVLIPPAEAARLAKSLPNCKAVDIGPGLNLLQEDNPDLIGSEIARWLSTLEISG

SEQ ID NO: 1799 - protein, 277 aa, Synthetic construct
MFHYVDVGPRDGTPVLFLHGNPTSSYVWRNIIPHVAPTHRCIAPDLIGMGKSDKPDLGYFFDDHVRFMDAFIEALGLEEVVLVIHDWGSALGFHWAKRNPERFKGIAFMEFIRPIPTWDEWPEFARETFQAFRTTDVGRKLIIDQNVFIEGTLPMGVVRPLTEVEMDHYREPFLNPVDREPLWRFPNELPIAGEPANIVALVEEYMDWLHQSPVPKLLFWGTPGVLIPPAEAARLAKSLPNCKAVDIGPGLNLLQEDNPDLIGSEIARWLSTLEISG

SEQ ID NO: 1800 - protein, 277 aa, Synthetic construct
MFHYVDVGPRDGTPVLFLHGNPTSSYVWRNIIPHVAPTHRCIAPDLIGMGKSDKPDLGYFFDDHVRFMDAFIEALGLEEVVLVIHDWGSALGFHWAKRNPERVRGIAFMEFIRPIPTWDEWPEFARETFQAFRTTDVGRKLIIDQNVFIEGTLPMGVVRPLTEVEMDHYREPFLNPVDREPLWRFPNELPIAGEPANIVALVEEYMDWLHQSPVPKLLFWGTPGVLIPPAEAARLAKSLPNCKAVDIGPGLNLLQEDNPDLIGSEIARWLSTLEISG

SEQ ID NO: 1801 - protein, 277 aa, Synthetic construct
MFHYVDVGPRDGTPVLFLHGNPTSSYVWRNIIPHVAPTHRCIAPDLIGMGKSDKPDLGYFFDDHVRFMDAFIEALGLEEVVLVIHDWGSALGFHWAKRNPERVAGIAFMEFIRPIPTWDEWPEFARETFQAFRTTDVGRKLIIDQNVFIEGTLPMGVVRPLTEVEMDHYREPFLNPVDREPLWRFPNELPIAGEPANIVALVEEYMDWLHQSPVPKLLFWGTPGVLIPPAEAARLAKSLPNCKAVDIGPGLNLLQEDNPDLIGSEIARWLSTLEISG

SEQ ID NO: 1802 - protein, 277 aa, Synthetic construct
MFHYVDVGPRDGTPVLFLHGNPTSSYVWRNIIPHVAPTHRCIAPDLIGMGKSDKPDLGYFFDDHVRFMDAFIEALGLEEVVLVIHDWGSALGFHWAKRNPERVSGIAFMEFIRPIPTWDEWPEFARETFQAFRTTDVGRKLIIDQNVFIEGTLPMGVVRPLTEVEMDHYREPFLNPVDREPLWRFPNELPIAGEPANIVALVEEYMDWLHQSPVPKLLFWGTPGVLIPPAEAARLAKSLPNCKAVDIGPGLNLLQEDNPDLIGSEIARWLSTLEISG

SEQ ID NO: 1803 - protein, 277 aa, Synthetic construct
MFHYVDVGPRDGTPVLFLHGNPTSSYVWRNIIPHVAPTHRCIAPDLIGMGKSDKPDLGYFFDDHVRFMDAFIEALGLEEVVLVIHDWGSALGFHWAKRNPERVLGIAFMEFIRPIPTWDEWPEFARETFQAFRTTDVGRKLIIDQNVFIEGTLPMGVVRPLTEVEMDHYREPFLNPVDREPLWRFPNELPIAGEPANIVALVEEYMDWLHQSPVPKLLFWGTPGVLIPPAEAARLAKSLPNCKAVDIGPGLNLLQEDNPDLIGSEIARWLSTLEISG

SEQ ID NO: 1804 - protein, 277 aa, Synthetic construct
MFHYVDVGPRDGTPVLFLHGNPTSSYVWRNIIPHVAPTHRCIAPDLIGMGKSDKPDLGYFFDDHVRFMDAFIEALGLEEVVLVIHDWGSALGFHWAKRNPERVTGIAFMEFIRPIPTWDEWPEFARETFQAFRTTDVGRKLIIDQNVFIEGTLPMGVVRPLTEVEMDHYREPFLNPVDREPLWRFPNELPIAGEPANIVALVEEYMDWLHQSPVPKLLFWGTPGVLIPPAEAARLAKSLPNCKAVDIGPGLNLLQEDNPDLIGSEIARWLSTLEISG

SEQ ID NO: 1805 - protein, 277 aa, Synthetic construct
MFHYVDVGPRDGTPVLFLHGNPTSSYVWRNIIPHVAPTHRCIAPDLIGMGKSDKPDLGYFFDDHVRFMDAFIEALGLEEVVLVIHDWGSALGFHWAKRNPERVVGIAFMEFIRPIPTWDEWPEFARETFQAFRTTDVGRKLIIDQNVFIEGTLPMGVVRPLTEVEMDHYREPFLNPVDREPLWRFPNELPIAGEPANIVALVEEYMDWLHQSPVPKLLFWGTPGVLIPPAEAARLAKSLPNCKAVDIGPGLNLLQEDNPDLIGSEIARWLSTLEISG

SEQ ID NO: 1806 - protein, 277 aa, Synthetic construct
MFHYVDVGPRDGTPVLFLHGNPTSSYVWRNIIPHVAPTHRCIAPDLIGMGKSDKPDLGYFFDDHVRFMDAFIEALGLEEVVLVIHDWGSALGFHWAKRNPERVKAIAFMEFIRPIPTWDEWPEFARETFQAFRTTDVGRKLIIDQNVFIEGTLPMGVVRPLTEVEMDHYREPFLNPVDREPLWRFPNELPIAGEPANIVALVEEYMDWLHQSPVPKLLFWGTPGVLIPPAEAARLAKSLPNCKAVDIGPGLNLLQEDNPDLIGSEIARWLSTLEISG

SEQ ID NO: 1807 - protein, 277 aa, Synthetic construct
MFHYVDVGPRDGTPVLFLHGNPTSSYVWRNIIPHVAPTHRCIAPDLIGMGKSDKPDLGYFFDDHVRFMDAFIEALGLEEVVLVIHDWGSALGFHWAKRNPERVKSIAFMEFIRPIPTWDEWPEFARETFQAFRTTDVGRKLIIDQNVFIEGTLPMGVVRPLTEVEMDHYREPFLNPVDREPLWRFPNELPIAGEPANIVALVEEYMDWLHQSPVPKLLFWGTPGVLIPPAEAARLAKSLPNCKAVDIGPGLNLLQEDNPDLIGSEIARWLSTLEISG

SEQ ID NO: 1808 - protein, 277 aa, Synthetic construct
MFHYVDVGPRDGTPVLFLHGNPTSSYVWRNIIPHVAPTHRCIAPDLIGMGKSDKPDLGYFFDDHVRFMDAFIEALGLEEVVLVIHDWGSALGFHWAKRNPERVKRIAFMEFIRPIPTWDEWPEFARETFQAFRTTDVGRKLIIDQNVFIEGTLPMGVVRPLTEVEMDHYREPFLNPVDREPLWRFPNELPIAGEPANIVALVEEYMDWLHQSPVPKLLFWGTPGVLIPPAEAARLAKSLPNCKAVDIGPGLNLLQEDNPDLIGSEIARWLSTLEISG

SEQ ID NO: 1809 - protein, 277 aa, Synthetic construct
MFHYVDVGPRDGTPVLFLHGNPTSSYVWRNIIPHVAPTHRCIAPDLIGMGKSDKPDLGYFFDDHVRFMDAFIEALGLEEVVLVIHDWGSALGFHWAKRNPERVKCIAFMEFIRPIPTWDEWPEFARETFQAFRTTDVGRKLIIDQNVFIEGTLPMGVVRPLTEVEMDHYREPFLNPVDREPLWRFPNELPIAGEPANIVALVEEYMDWLHQSPVPKLLFWGTPGVLIPPAEAARLAKSLPNCKAVDIGPGLNLLQEDNPDLIGSEIARWLSTLEISG

SEQ ID NO: 1810 - protein, 277 aa, Synthetic construct
MFHYVDVGPRDGTPVLFLHGNPTSSYVWRNIIPHVAPTHRCIAPDLIGMGKSDKPDLGYFFDDHVRFMDAFIEALGLEEVVLVIHDWGSALGFHWAKRNPERVKTIAFMEFIRPIPTWDEWPEFARETFQAFRTTDVGRKLIIDQNVFIEGTLPMGVVRPLTEVEMDHYREPFLNPVDREPLWRFPNELPIAGEPANIVALVEEYMDWLHQSPVPKLLFWGTPGVLIPPAEAARLAKSLPNCKAVDIGPGLNLLQEDNPDLIGSEIARWLSTLEISG

SEQ ID NO: 1811 - protein, 277 aa, Synthetic construct
MFHYVDVGPRDGTPVLFLHGNPTSSYVWRNIIPHVAPTHRCIAPDLIGMGKSDKPDLGYFFDDHVRFMDAFIEALGLEEVVLVIHDWGSALGFHWAKRNPERVKVIAFMEFIRPIPTWDEWPEFARETFQAFRTTDVGRKLIIDQNVFIEGTLPMGVVRPLTEVEMDHYREPFLNPVDREPLWRFPNELPIAGEPANIVALVEEYMDWLHQSPVPKLLFWGTPGVLIPPAEAARLAKSLPNCKAVDIGPGLNLLQEDNPDLIGSEIARWLSTLEISG

SEQ ID NO: 1812 - protein, 277 aa, Synthetic construct
MFHYVDVGPRDGTPVLFLHGNPTSSYVWRNIIPHVAPTHRCIAPDLIGMGKSDKPDLGYFFDDHVRFMDAFIEALGLEEVVLVIHDWGSALGFHWAKRNPERVKGLAFMEFIRPIPTWDEWPEFARETFQAFRTTDVGRKLIIDQNVFIEGTLPMGVVRPLTEVEMDHYREPFLNPVDREPLWRFPNELPIAGEPANIVALVEEYMDWLHQSPVPKLLFWGTPGVLIPPAEAARLAKSLPNCKAVDIGPGLNLLQEDNPDLIGSEIARWLSTLEISG

SEQ ID NO: 1813 - protein, 277 aa, Synthetic construct
MFHYVDVGPRDGTPVLFLHGNPTSSYVWRNIIPHVAPTHRCIAPDLIGMGKSDKPDLGYFFDDHVRFMDAFIEALGLEEVVLVIHDWGSALGFHWAKRNPERVKGVAFMEFIRPIPTWDEWPEFARETFQAFRTTDVGRKLIIDQNVFIEGTLPMGVVRPLTEVEMDHYREPFLNPVDREPLWRFPNELPIAGEPANIVALVEEYMDWLHQSPVPKLLFWGTPGVLIPPAEAARLAKSLPNCKAVDIGPGLNLLQEDNPDLIGSEIARWLSTLEISG

SEQ ID NO: 1814 - protein, 277 aa, Synthetic construct
MFHYVDVGPRDGTPVLFLHGNPTSSYVWRNIIPHVAPTHRCIAPDLIGMGKSDKPDLGYFFDDHVRFMDAFIEALGLEEVVLVIHDWGSALGFHWAKRNPERVKGMAFMEFIRPIPTWDEWPEFARETFQAFRTTDVGRKLIIDQNVFIEGTLPMGVVRPLTEVEMDHYREPFLNPVDREPLWRFPNELPIAGEPANIVALVEEYMDWLHQSPVPKLLFWGTPGVLIPPAEAARLAKSLPNCKAVDIGPGLNLLQEDNPDLIGSEIARWLSTLEISG

SEQ ID NO: 1815 - protein, 277 aa, Synthetic construct
MFHYVDVGPRDGTPVLFLHGNPTSSYVWRNIIPHVAPTHRCIAPDLIGMGKSDKPDLGYFFDDHVRFMDAFIEALGLEEVVLVIHDWGSALGFHWAKRNPERVKGFAFMEFIRPIPTWDEWPEFARETFQAFRTTDVGRKLIIDQNVFIEGTLPMGVVRPLTEVEMDHYREPFLNPVDREPLWRFPNELPIAGEPANIVALVEEYMDWLHQSPVPKLLFWGTPGVLIPPAEAARLAKSLPNCKAVDIGPGLNLLQEDNPDLIGSEIARWLSTLEISG

SEQ ID NO: 1816 - protein, 277 aa, Synthetic construct
MFHYVDVGPRDGTPVLFLHGNPTSSYVWRNIIPHVAPTHRCIAPDLIGMGKSDKPDLGYFFDDHVRFMDAFIEALGLEEVVLVIHDWGSALGFHWAKRNPERVKGAAFMEFIRPIPTWDEWPEFARETFQAFRTTDVGRKLIIDQNVFIEGTLPMGVVRPLTEVEMDHYREPFLNPVDREPLWRFPNELPIAGEPANIVALVEEYMDWLHQSPVPKLLFWGTPGVLIPPAEAARLAKSLPNCKAVDIGPGLNLLQEDNPDLIGSEIARWLSTLEISG

SEQ ID NO: 1817 - protein, 277 aa, Synthetic construct
MFHYVDVGPRDGTPVLFLHGNPTSSYVWRNIIPHVAPTHRCIAPDLIGMGKSDKPDLGYFFDDHVRFMDAFIEALGLEEVVLVIHDWGSALGFHWAKRNPERVKGYAFMEFIRPIPTWDEWPEFARETFQAFRTTDVGRKLIIDQNVFIEGTLPMGVVRPLTEVEMDHYREPFLNPVDREPLWRFPNELPIAGEPANIVALVEEYMDWLHQSPVPKLLFWGTPGVLIPPAEAARLAKSLPNCKAVDIGPGLNLLQEDNPDLIGSEIARWLSTLEISG

SEQ ID NO: 1818 - protein, 277 aa, Synthetic construct
MFHYVDVGPRDGTPVLFLHGNPTSSYVWRNIIPHVAPTHRCIAPDLIGMGKSDKPDLGYFFDDHVRFMDAFIEALGLEEVVLVIHDWGSALGFHWAKRNPERVKGIVFMEFIRPIPTWDEWPEFARETFQAFRTTDVGRKLIIDQNVFIEGTLPMGVVRPLTEVEMDHYREPFLNPVDREPLWRFPNELPIAGEPANIVALVEEYMDWLHQSPVPKLLFWGTPGVLIPPAEAARLAKSLPNCKAVDIGPGLNLLQEDNPDLIGSEIARWLSTLEISG

SEQ ID NO: 1819 - protein, 277 aa, Synthetic construct
MFHYVDVGPRDGTPVLFLHGNPTSSYVWRNIIPHVAPTHRCIAPDLIGMGKSDKPDLGYFFDDHVRFMDAFIEALGLEEVVLVIHDWGSALGFHWAKRNPERVKGICFMEFIRPIPTWDEWPEFARETFQAFRTTDVGRKLIIDQNVFIEGTLPMGVVRPLTEVEMDHYREPFLNPVDREPLWRFPNELPIAGEPANIVALVEEYMDWLHQSPVPKLLFWGTPGVLIPPAEAARLAKSLPNCKAVDIGPGLNLLQEDNPDLIGSEIARWLSTLEISG

SEQ ID NO: 1820 - protein, 277 aa, Synthetic construct
MFHYVDVGPRDGTPVLFLHGNPTSSYVWRNIIPHVAPTHRCIAPDLIGMGKSDKPDLGYFFDDHVRFMDAFIEALGLEEVVLVIHDWGSALGFHWAKRNPERVKGIGFMEFIRPIPTWDEWPEFARETFQAFRTTDVGRKLIIDQNVFIEGTLPMGVVRPLTEVEMDHYREPFLNPVDREPLWRFPNELPIAGEPANIVALVEEYMDWLHQSPVPKLLFWGTPGVLIPPAEAARLAKSLPNCKAVDIGPGLNLLQEDNPDLIGSEIARWLSTLEISG

SEQ ID NO: 1821 - protein, 277 aa, Synthetic construct
MFHYVDVGPRDGTPVLFLHGNPTSSYVWRNIIPHVAPTHRCIAPDLIGMGKSDKPDLGYFFDDHVRFMDAFIEALGLEEVVLVIHDWGSALGFHWAKRNPERVKGIIFMEFIRPIPTWDEWPEFARETFQAFRTTDVGRKLIIDQNVFIEGTLPMGVVRPLTEVEMDHYREPFLNPVDREPLWRFPNELPIAGEPANIVALVEEYMDWLHQSPVPKLLFWGTPGVLIPPAEAARLAKSLPNCKAVDIGPGLNLLQEDNPDLIGSEIARWLSTLEISG

SEQ ID NO: 1822 - protein, 277 aa, Synthetic construct
MFHYVDVGPRDGTPVLFLHGNPTSSYVWRNIIPHVAPTHRCIAPDLIGMGKSDKPDLGYFFDDHVRFMDAFIEALGLEEVVLVIHDWGSALGFHWAKRNPERVKGISFMEFIRPIPTWDEWPEFARETFQAFRTTDVGRKLIIDQNVFIEGTLPMGVVRPLTEVEMDHYREPFLNPVDREPLWRFPNELPIAGEPANIVALVEEYMDWLHQSPVPKLLFWGTPGVLIPPAEAARLAKSLPNCKAVDIGPGLNLLQEDNPDLIGSEIARWLSTLEISG

SEQ ID NO: 1823 - protein, 277 aa, Synthetic construct
MFHYVDVGPRDGTPVLFLHGNPTSSYVWRNIIPHVAPTHRCIAPDLIGMGKSDKPDLGYFFDDHVRFMDAFIEALGLEEVVLVIHDWGSALGFHWAKRNPERVKGITFMEFIRPIPTWDEWPEFARETFQAFRTTDVGRKLIIDQNVFIEGTLPMGVVRPLTEVEMDHYREPFLNPVDREPLWRFPNELPIAGEPANIVALVEEYMDWLHQSPVPKLLFWGTPGVLIPPAEAARLAKSLPNCKAVDIGPGLNLLQEDNPDLIGSEIARWLSTLEISG

SEQ ID NO: 1824 - protein, 277 aa, Synthetic construct
MFHYVDVGPRDGTPVLFLHGNPTSSYVWRNIIPHVAPTHRCIAPDLIGMGKSDKPDLGYFFDDHVRFMDAFIEALGLEEVVLVIHDWGSALGFHWAKRNPERVKGIAYMEFIRPIPTWDEWPEFARETFQAFRTTDVGRKLIIDQNVFIEGTLPMGVVRPLTEVEMDHYREPFLNPVDREPLWRFPNELPIAGEPANIVALVEEYMDWLHQSPVPKLLFWGTPGVLIPPAEAARLAKSLPNCKAVDIGPGLNLLQEDNPDLIGSEIARWLSTLEISG

SEQ ID NO: 1825 - protein, 277 aa, Synthetic construct
MFHYVDVGPRDGTPVLFLHGNPTSSYVWRNIIPHVAPTHRCIAPDLIGMGKSDKPDLGYFFDDHVRFMDAFIEALGLEEVVLVIHDWGSALGFHWAKRNPERVKGIALMEFIRPIPTWDEWPEFARETFQAFRTTDVGRKLIIDQNVFIEGTLPMGVVRPLTEVEMDHYREPFLNPVDREPLWRFPNELPIAGEPANIVALVEEYMDWLHQSPVPKLLFWGTPGVLIPPAEAARLAKSLPNCKAVDIGPGLNLLQEDNPDLIGSEIARWLSTLEISG

SEQ ID NO: 1826 - protein, 277 aa, Synthetic construct
MFHYVDVGPRDGTPVLFLHGNPTSSYVWRNIIPHVAPTHRCIAPDLIGMGKSDKPDLGYFFDDHVRFMDAFIEALGLEEVVLVIHDWGSALGFHWAKRNPERVKGIAIMEFIRPIPTWDEWPEFARETFQAFRTTDVGRKLIIDQNVFIEGTLPMGVVRPLTEVEMDHYREPFLNPVDREPLWRFPNELPIAGEPANIVALVEEYMDWLHQSPVPKLLFWGTPGVLIPPAEAARLAKSLPNCKAVDIGPGLNLLQEDNPDLIGSEIARWLSTLEISG

SEQ ID NO: 1827 - protein, 277 aa, Synthetic construct
MFHYVDVGPRDGTPVLFLHGNPTSSYVWRNIIPHVAPTHRCIAPDLIGMGKSDKPDLGYFFDDHVRFMDAFIEALGLEEVVLVIHDWGSALGFHWAKRNPERVKGIAMMEFIRPIPTWDEWPEFARETFQAFRTTDVGRKLIIDQNVFIEGTLPMGVVRPLTEVEMDHYREPFLNPVDREPLWRFPNELPIAGEPANIVALVEEYMDWLHQSPVPKLLFWGTPGVLIPPAEAARLAKSLPNCKAVDIGPGLNLLQEDNPDLIGSEIARWLSTLEISG

SEQ ID NO: 1828 - protein, 277 aa, Synthetic construct
MFHYVDVGPRDGTPVLFLHGNPTSSYVWRNIIPHVAPTHRCIAPDLIGMGKSDKPDLGYFFDDHVRFMDAFIEALGLEEVVLVIHDWGSALGFHWAKRNPERVKGIAVMEFIRPIPTWDEWPEFARETFQAFRTTDVGRKLIIDQNVFIEGTLPMGVVRPLTEVEMDHYREPFLNPVDREPLWRFPNELPIAGEPANIVALVEEYMDWLHQSPVPKLLFWGTPGVLIPPAEAARLAKSLPNCKAVDIGPGLNLLQEDNPDLIGSEIARWLSTLEISG

SEQ ID NO: 1829 - protein, 277 aa, Synthetic construct
MFHYVDVGPRDGTPVLFLHGNPTSSYVWRNIIPHVAPTHRCIAPDLIGMGKSDKPDLGYFFDDHVRFMDAFIEALGLEEVVLVIHDWGSALGFHWAKRNPERVKGIAHMEFIRPIPTWDEWPEFARETFQAFRTTDVGRKLIIDQNVFIEGTLPMGVVRPLTEVEMDHYREPFLNPVDREPLWRFPNELPIAGEPANIVALVEEYMDWLHQSPVPKLLFWGTPGVLIPPAEAARLAKSLPNCKAVDIGPGLNLLQEDNPDLIGSEIARWLSTLEISG

SEQ ID NO: 1830 - protein, 277 aa, Synthetic construct
MFHYVDVGPRDGTPVLFLHGNPTSSYVWRNIIPHVAPTHRCIAPDLIGMGKSDKPDLGYFFDDHVRFMDAFIEALGLEEVVLVIHDWGSALGFHWAKRNPERVKGIAFLEFIRPIPTWDEWPEFARETFQAFRTTDVGRKLIIDQNVFIEGTLPMGVVRPLTEVEMDHYREPFLNPVDREPLWRFPNELPIAGEPANIVALVEEYMDWLHQSPVPKLLFWGTPGVLIPPAEAARLAKSLPNCKAVDIGPGLNLLQEDNPDLIGSEIARWLSTLEISG

SEQ ID NO: 1831 - protein, 277 aa, Synthetic construct
MFHYVDVGPRDGTPVLFLHGNPTSSYVWRNIIPHVAPTHRCIAPDLIGMGKSDKPDLGYFFDDHVRFMDAFIEALGLEEVVLVIHDWGSALGFHWAKRNPERVKGIAFFEFIRPIPTWDEWPEFARETFQAFRTTDVGRKLIIDQNVFIEGTLPMGVVRPLTEVEMDHYREPFLNPVDREPLWRFPNELPIAGEPANIVALVEEYMDWLHQSPVPKLLFWGTPGVLIPPAEAARLAKSLPNCKAVDIGPGLNLLQEDNPDLIGSEIARWLSTLEISG

SEQ ID NO: 1832 - protein, 277 aa, Synthetic construct
MFHYVDVGPRDGTPVLFLHGNPTSSYVWRNIIPHVAPTHRCIAPDLIGMGKSDKPDLGYFFDDHVRFMDAFIEALGLEEVVLVIHDWGSALGFHWAKRNPERVKGIAFTEFIRPIPTWDEWPEFARETFQAFRTTDVGRKLIIDQNVFIEGTLPMGVVRPLTEVEMDHYREPFLNPVDREPLWRFPNELPIAGEPANIVALVEEYMDWLHQSPVPKLLFWGTPGVLIPPAEAARLAKSLPNCKAVDIGPGLNLLQEDNPDLIGSEIARWLSTLEISG

SEQ ID NO: 1833 - protein, 277 aa, Synthetic construct
MFHYVDVGPRDGTPVLFLHGNPTSSYVWRNIIPHVAPTHRCIAPDLIGMGKSDKPDLGYFFDDHVRFMDAFIEALGLEEVVLVIHDWGSALGFHWAKRNPERVKGIAFAEFIRPIPTWDEWPEFARETFQAFRTTDVGRKLIIDQNVFIEGTLPMGVVRPLTEVEMDHYREPFLNPVDREPLWRFPNELPIAGEPANIVALVEEYMDWLHQSPVPKLLFWGTPGVLIPPAEAARLAKSLPNCKAVDIGPGLNLLQEDNPDLIGSEIARWLSTLEISG

SEQ ID NO: 1834 - protein, 277 aa, Synthetic construct
MFHYVDVGPRDGTPVLFLHGNPTSSYVWRNIIPHVAPTHRCIAPDLIGMGKSDKPDLGYFFDDHVRFMDAFIEALGLEEVVLVIHDWGSALGFHWAKRNPERVKGIAFIEFIRPIPTWDEWPEFARETFQAFRTTDVGRKLIIDQNVFIEGTLPMGVVRPLTEVEMDHYREPFLNPVDREPLWRFPNELPIAGEPANIVALVEEYMDWLHQSPVPKLLFWGTPGVLIPPAEAARLAKSLPNCKAVDIGPGLNLLQEDNPDLIGSEIARWLSTLEISG

SEQ ID NO: 1835 - protein, 277 aa, Synthetic construct
MFHYVDVGPRDGTPVLFLHGNPTSSYVWRNIIPHVAPTHRCIAPDLIGMGKSDKPDLGYFFDDHVRFMDAFIEALGLEEVVLVIHDWGSALGFHWAKRNPERVKGIAFSEFIRPIPTWDEWPEFARETFQAFRTTDVGRKLIIDQNVFIEGTLPMGVVRPLTEVEMDHYREPFLNPVDREPLWRFPNELPIAGEPANIVALVEEYMDWLHQSPVPKLLFWGTPGVLIPPAEAARLAKSLPNCKAVDIGPGLNLLQEDNPDLIGSEIARWLSTLEISG

SEQ ID NO: 1836 - protein, 277 aa, Synthetic construct
MFHYVDVGPRDGTPVLFLHGNPTSSYVWRNIIPHVAPTHRCIAPDLIGMGKSDKPDLGYFFDDHVRFMDAFIEALGLEEVVLVIHDWGSALGFHWAKRNPERVKGIAFMDFIRPIPTWDEWPEFARETFQAFRTTDVGRKLIIDQNVFIEGTLPMGVVRPLTEVEMDHYREPFLNPVDREPLWRFPNELPIAGEPANIVALVEEYMDWLHQSPVPKLLFWGTPGVLIPPAEAARLAKSLPNCKAVDIGPGLNLLQEDNPDLIGSEIARWLSTLEISG

SEQ ID NO: 1837 - protein, 277 aa, Synthetic construct
MFHYVDVGPRDGTPVLFLHGNPTSSYVWRNIIPHVAPTHRCIAPDLIGMGKSDKPDLGYFFDDHVRFMDAFIEALGLEEVVLVIHDWGSALGFHWAKRNPERVKGIAFMQFIRPIPTWDEWPEFARETFQAFRTTDVGRKLIIDQNVFIEGTLPMGVVRPLTEVEMDHYREPFLNPVDREPLWRFPNELPIAGEPANIVALVEEYMDWLHQSPVPKLLFWGTPGVLIPPAEAARLAKSLPNCKAVDIGPGLNLLQEDNPDLIGSEIARWLSTLEISG

SEQ ID NO: 1838 - protein, 277 aa, Synthetic construct
MFHYVDVGPRDGTPVLFLHGNPTSSYVWRNIIPHVAPTHRCIAPDLIGMGKSDKPDLGYFFDDHVRFMDAFIEALGLEEVVLVIHDWGSALGFHWAKRNPERVKGIAFMNFIRPIPTWDEWPEFARETFQAFRTTDVGRKLIIDQNVFIEGTLPMGVVRPLTEVEMDHYREPFLNPVDREPLWRFPNELPIAGEPANIVALVEEYMDWLHQSPVPKLLFWGTPGVLIPPAEAARLAKSLPNCKAVDIGPGLNLLQEDNPDLIGSEIARWLSTLEISG

SEQ ID NO: 1839 - protein, 277 aa, Synthetic construct
MFHYVDVGPRDGTPVLFLHGNPTSSYVWRNIIPHVAPTHRCIAPDLIGMGKSDKPDLGYFFDDHVRFMDAFIEALGLEEVVLVIHDWGSALGFHWAKRNPERVKGIAFMGFIRPIPTWDEWPEFARETFQAFRTTDVGRKLIIDQNVFIEGTLPMGVVRPLTEVEMDHYREPFLNPVDREPLWRFPNELPIAGEPANIVALVEEYMDWLHQSPVPKLLFWGTPGVLIPPAEAARLAKSLPNCKAVDIGPGLNLLQEDNPDLIGSEIARWLSTLEISG

SEQ ID NO: 1840 - protein, 277 aa, Synthetic construct
MFHYVDVGPRDGTPVLFLHGNPTSSYVWRNIIPHVAPTHRCIAPDLIGMGKSDKPDLGYFFDDHVRFMDAFIEALGLEEVVLVIHDWGSALGFHWAKRNPERVKGIAFMSFIRPIPTWDEWPEFARETFQAFRTTDVGRKLIIDQNVFIEGTLPMGVVRPLTEVEMDHYREPFLNPVDREPLWRFPNELPIAGEPANIVALVEEYMDWLHQSPVPKLLFWGTPGVLIPPAEAARLAKSLPNCKAVDIGPGLNLLQEDNPDLIGSEIARWLSTLEISG

SEQ ID NO: 1841 - protein, 277 aa, Synthetic construct
MFHYVDVGPRDGTPVLFLHGNPTSSYVWRNIIPHVAPTHRCIAPDLIGMGKSDKPDLGYFFDDHVRFMDAFIEALGLEEVVLVIHDWGSALGFHWAKRNPERVKGIAFMAFIRPIPTWDEWPEFARETFQAFRTTDVGRKLIIDQNVFIEGTLPMGVVRPLTEVEMDHYREPFLNPVDREPLWRFPNELPIAGEPANIVALVEEYMDWLHQSPVPKLLFWGTPGVLIPPAEAARLAKSLPNCKAVDIGPGLNLLQEDNPDLIGSEIARWLSTLEISG

SEQ ID NO: 1842 - protein, 277 aa, Synthetic construct
MFHYVDVGPRDGTPVLFLHGNPTSSYVWRNIIPHVAPTHRCIAPDLIGMGKSDKPDLGYFFDDHVRFMDAFIEALGLEEVVLVIHDWGSALGFHWAKRNPERVKGIAFMEAIRPIPTWDEWPEFARETFQAFRTTDVGRKLIIDQNVFIEGTLPMGVVRPLTEVEMDHYREPFLNPVDREPLWRFPNELPIAGEPANIVALVEEYMDWLHQSPVPKLLFWGTPGVLIPPAEAARLAKSLPNCKAVDIGPGLNLLQEDNPDLIGSEIARWLSTLEISG

SEQ ID NO: 1843 - protein, 277 aa, Synthetic construct
MFHYVDVGPRDGTPVLFLHGNPTSSYVWRNIIPHVAPTHRCIAPDLIGMGKSDKPDLGYFFDDHVRFMDAFIEALGLEEVVLVIHDWGSALGFHWAKRNPERVKGIAFMETIRPIPTWDEWPEFARETFQAFRTTDVGRKLIIDQNVFIEGTLPMGVVRPLTEVEMDHYREPFLNPVDREPLWRFPNELPIAGEPANIVALVEEYMDWLHQSPVPKLLFWGTPGVLIPPAEAARLAKSLPNCKAVDIGPGLNLLQEDNPDLIGSEIARWLSTLEISG

SEQ ID NO: 1844 - protein, 277 aa, Synthetic construct
MFHYVDVGPRDGTPVLFLHGNPTSSYVWRNIIPHVAPTHRCIAPDLIGMGKSDKPDLGYFFDDHVRFMDAFIEALGLEEVVLVIHDWGSALGFHWAKRNPERVKGIAFMEVIRPIPTWDEWPEFARETFQAFRTTDVGRKLIIDQNVFIEGTLPMGVVRPLTEVEMDHYREPFLNPVDREPLWRFPNELPIAGEPANIVALVEEYMDWLHQSPVPKLLFWGTPGVLIPPAEAARLAKSLPNCKAVDIGPGLNLLQEDNPDLIGSEIARWLSTLEISG

SEQ ID NO: 1845 - protein, 277 aa, Synthetic construct
MFHYVDVGPRDGTPVLFLHGNPTSSYVWRNIIPHVAPTHRCIAPDLIGMGKSDKPDLGYFFDDHVRFMDAFIEALGLEEVVLVIHDWGSALGFHWAKRNPERVKGIAFMEGIRPIPTWDEWPEFARETFQAFRTTDVGRKLIIDQNVFIEGTLPMGVVRPLTEVEMDHYREPFLNPVDREPLWRFPNELPIAGEPANIVALVEEYMDWLHQSPVPKLLFWGTPGVLIPPAEAARLAKSLPNCKAVDIGPGLNLLQEDNPDLIGSEIARWLSTLEISG

SEQ ID NO: 1846 - protein, 277 aa, Synthetic construct
MFHYVDVGPRDGTPVLFLHGNPTSSYVWRNIIPHVAPTHRCIAPDLIGMGKSDKPDLGYFFDDHVRFMDAFIEALGLEEVVLVIHDWGSALGFHWAKRNPERVKGIAFMEMIRPIPTWDEWPEFARETFQAFRTTDVGRKLIIDQNVFIEGTLPMGVVRPLTEVEMDHYREPFLNPVDREPLWRFPNELPIAGEPANIVALVEEYMDWLHQSPVPKLLFWGTPGVLIPPAEAARLAKSLPNCKAVDIGPGLNLLQEDNPDLIGSEIARWLSTLEISG

SEQ ID NO: 1847 - protein, 277 aa, Synthetic construct
MFHYVDVGPRDGTPVLFLHGNPTSSYVWRNIIPHVAPTHRCIAPDLIGMGKSDKPDLGYFFDDHVRFMDAFIEALGLEEVVLVIHDWGSALGFHWAKRNPERVKGIAFMESIRPIPTWDEWPEFARETFQAFRTTDVGRKLIIDQNVFIEGTLPMGVVRPLTEVEMDHYREPFLNPVDREPLWRFPNELPIAGEPANIVALVEEYMDWLHQSPVPKLLFWGTPGVLIPPAEAARLAKSLPNCKAVDIGPGLNLLQEDNPDLIGSEIARWLSTLEISG

SEQ ID NO: 1848 - protein, 277 aa, Synthetic construct
MFHYVDVGPRDGTPVLFLHGNPTSSYVWRNIIPHVAPTHRCIAPDLIGMGKSDKPDLGYFFDDHVRFMDAFIEALGLEEVVLVIHDWGSALGFHWAKRNPERVKGIAFMEFVRPIPTWDEWPEFARETFQAFRTTDVGRKLIIDQNVFIEGTLPMGVVRPLTEVEMDHYREPFLNPVDREPLWRFPNELPIAGEPANIVALVEEYMDWLHQSPVPKLLFWGTPGVLIPPAEAARLAKSLPNCKAVDIGPGLNLLQEDNPDLIGSEIARWLSTLEISG

SEQ ID NO: 1849 - protein, 277 aa, Synthetic construct
MFHYVDVGPRDGTPVLFLHGNPTSSYVWRNIIPHVAPTHRCIAPDLIGMGKSDKPDLGYFFDDHVRFMDAFIEALGLEEVVLVIHDWGSALGFHWAKRNPERVKGIAFMEFLRPIPTWDEWPEFARETFQAFRTTDVGRKLIIDQNVFIEGTLPMGVVRPLTEVEMDHYREPFLNPVDREPLWRFPNELPIAGEPANIVALVEEYMDWLHQSPVPKLLFWGTPGVLIPPAEAARLAKSLPNCKAVDIGPGLNLLQEDNPDLIGSEIARWLSTLEISG

SEQ ID NO: 1850 - protein, 277 aa, Synthetic construct
MFHYVDVGPRDGTPVLFLHGNPTSSYVWRNIIPHVAPTHRCIAPDLIGMGKSDKPDLGYFFDDHVRFMDAFIEALGLEEVVLVIHDWGSALGFHWAKRNPERVKGIAFMEFMRPIPTWDEWPEFARETFQAFRTTDVGRKLIIDQNVFIEGTLPMGVVRPLTEVEMDHYREPFLNPVDREPLWRFPNELPIAGEPANIVALVEEYMDWLHQSPVPKLLFWGTPGVLIPPAEAARLAKSLPNCKAVDIGPGLNLLQEDNPDLIGSEIARWLSTLEISG

SEQ ID NO: 1851 - protein, 277 aa, Synthetic construct
MFHYVDVGPRDGTPVLFLHGNPTSSYVWRNIIPHVAPTHRCIAPDLIGMGKSDKPDLGYFFDDHVRFMDAFIEALGLEEVVLVIHDWGSALGFHWAKRNPERVKGIAFMEFARPIPTWDEWPEFARETFQAFRTTDVGRKLIIDQNVFIEGTLPMGVVRPLTEVEMDHYREPFLNPVDREPLWRFPNELPIAGEPANIVALVEEYMDWLHQSPVPKLLFWGTPGVLIPPAEAARLAKSLPNCKAVDIGPGLNLLQEDNPDLIGSEIARWLSTLEISG

SEQ ID NO: 1852 - protein, 277 aa, Synthetic construct
MFHYVDVGPRDGTPVLFLHGNPTSSYVWRNIIPHVAPTHRCIAPDLIGMGKSDKPDLGYFFDDHVRFMDAFIEALGLEEVVLVIHDWGSALGFHWAKRNPERVKGIAFMEFFRPIPTWDEWPEFARETFQAFRTTDVGRKLIIDQNVFIEGTLPMGVVRPLTEVEMDHYREPFLNPVDREPLWRFPNELPIAGEPANIVALVEEYMDWLHQSPVPKLLFWGTPGVLIPPAEAARLAKSLPNCKAVDIGPGLNLLQEDNPDLIGSEIARWLSTLEISG

SEQ ID NO: 1853 - protein, 277 aa, Synthetic construct
MFHYVDVGPRDGTPVLFLHGNPTSSYVWRNIIPHVAPTHRCIAPDLIGMGKSDKPDLGYFFDDHVRFMDAFIEALGLEEVVLVIHDWGSALGFHWAKRNPERVKGIAFMEFTRPIPTWDEWPEFARETFQAFRTTDVGRKLIIDQNVFIEGTLPMGVVRPLTEVEMDHYREPFLNPVDREPLWRFPNELPIAGEPANIVALVEEYMDWLHQSPVPKLLFWGTPGVLIPPAEAARLAKSLPNCKAVDIGPGLNLLQEDNPDLIGSEIARWLSTLEISG

SEQ ID NO: 1854 - protein, 277 aa, Synthetic construct
MFHYVDVGPRDGTPVLFLHGNPTSSYVWRNIIPHVAPTHRCIAPDLIGMGKSDKPDLGYFFDDHVRFMDAFIEALGLEEVVLVIHDWGSALGFHWAKRNPERVKGIAFMEFIAPIPTWDEWPEFARETFQAFRTTDVGRKLIIDQNVFIEGTLPMGVVRPLTEVEMDHYREPFLNPVDREPLWRFPNELPIAGEPANIVALVEEYMDWLHQSPVPKLLFWGTPGVLIPPAEAARLAKSLPNCKAVDIGPGLNLLQEDNPDLIGSEIARWLSTLEISG

SEQ ID NO: 1855 - protein, 277 aa, Synthetic construct
MFHYVDVGPRDGTPVLFLHGNPTSSYVWRNIIPHVAPTHRCIAPDLIGMGKSDKPDLGYFFDDHVRFMDAFIEALGLEEVVLVIHDWGSALGFHWAKRNPERVKGIAFMEFIVPIPTWDEWPEFARETFQAFRTTDVGRKLIIDQNVFIEGTLPMGVVRPLTEVEMDHYREPFLNPVDREPLWRFPNELPIAGEPANIVALVEEYMDWLHQSPVPKLLFWGTPGVLIPPAEAARLAKSLPNCKAVDIGPGLNLLQEDNPDLIGSEIARWLSTLEISG

SEQ ID NO: 1856 - protein, 277 aa, Synthetic construct
MFHYVDVGPRDGTPVLFLHGNPTSSYVWRNIIPHVAPTHRCIAPDLIGMGKSDKPDLGYFFDDHVRFMDAFIEALGLEEVVLVIHDWGSALGFHWAKRNPERVKGIAFMEFILPIPTWDEWPEFARETFQAFRTTDVGRKLIIDQNVFIEGTLPMGVVRPLTEVEMDHYREPFLNPVDREPLWRFPNELPIAGEPANIVALVEEYMDWLHQSPVPKLLFWGTPGVLIPPAEAARLAKSLPNCKAVDIGPGLNLLQEDNPDLIGSEIARWLSTLEISG

SEQ ID NO: 1857 - protein, 277 aa, Synthetic construct
MFHYVDVGPRDGTPVLFLHGNPTSSYVWRNIIPHVAPTHRCIAPDLIGMGKSDKPDLGYFFDDHVRFMDAFIEALGLEEVVLVIHDWGSALGFHWAKRNPERVKGIAFMEFITPIPTWDEWPEFARETFQAFRTTDVGRKLIIDQNVFIEGTLPMGVVRPLTEVEMDHYREPFLNPVDREPLWRFPNELPIAGEPANIVALVEEYMDWLHQSPVPKLLFWGTPGVLIPPAEAARLAKSLPNCKAVDIGPGLNLLQEDNPDLIGSEIARWLSTLEISG

SEQ ID NO: 1858 - protein, 277 aa, Synthetic construct
MFHYVDVGPRDGTPVLFLHGNPTSSYVWRNIIPHVAPTHRCIAPDLIGMGKSDKPDLGYFFDDHVRFMDAFIEALGLEEVVLVIHDWGSALGFHWAKRNPERVKGIAFMEFIGPIPTWDEWPEFARETFQAFRTTDVGRKLIIDQNVFIEGTLPMGVVRPLTEVEMDHYREPFLNPVDREPLWRFPNELPIAGEPANIVALVEEYMDWLHQSPVPKLLFWGTPGVLIPPAEAARLAKSLPNCKAVDIGPGLNLLQEDNPDLIGSEIARWLSTLEISG

SEQ ID NO: 1859 - protein, 277 aa, Synthetic construct
MFHYVDVGPRDGTPVLFLHGNPTSSYVWRNIIPHVAPTHRCIAPDLIGMGKSDKPDLGYFFDDHVRFMDAFIEALGLEEVVLVIHDWGSALGFHWAKRNPERVKGIAFMEFISPIPTWDEWPEFARETFQAFRTTDVGRKLIIDQNVFIEGTLPMGVVRPLTEVEMDHYREPFLNPVDREPLWRFPNELPIAGEPANIVALVEEYMDWLHQSPVPKLLFWGTPGVLIPPAEAARLAKSLPNCKAVDIGPGLNLLQEDNPDLIGSEIARWLSTLEISG

SEQ ID NO: 1860 - protein, 277 aa, Synthetic construct
MFHYVDVGPRDGTPVLFLHGNPTSSYVWRNIIPHVAPTHRCIAPDLIGMGKSDKPDLGYFFDDHVRFMDAFIEALGLEEVVLVIHDWGSALGFHWAKRNPERVKGIAFMEFIRTIPTWDEWPEFARETFQAFRTTDVGRKLIIDQNVFIEGTLPMGVVRPLTEVEMDHYREPFLNPVDREPLWRFPNELPIAGEPANIVALVEEYMDWLHQSPVPKLLFWGTPGVLIPPAEAARLAKSLPNCKAVDIGPGLNLLQEDNPDLIGSEIARWLSTLEISG

SEQ ID NO: 1861 - protein, 277 aa, Synthetic construct
MFHYVDVGPRDGTPVLFLHGNPTSSYVWRNIIPHVAPTHRCIAPDLIGMGKSDKPDLGYFFDDHVRFMDAFIEALGLEEVVLVIHDWGSALGFHWAKRNPERVKGIAFMEFIRAIPTWDEWPEFARETFQAFRTTDVGRKLIIDQNVFIEGTLPMGVVRPLTEVEMDHYREPFLNPVDREPLWRFPNELPIAGEPANIVALVEEYMDWLHQSPVPKLLFWGTPGVLIPPAEAARLAKSLPNCKAVDIGPGLNLLQEDNPDLIGSEIARWLSTLEISG

SEQ ID NO: 1862 - protein, 277 aa, Synthetic construct
MFHYVDVGPRDGTPVLFLHGNPTSSYVWRNIIPHVAPTHRCIAPDLIGMGKSDKPDLGYFFDDHVRFMDAFIEALGLEEVVLVIHDWGSALGFHWAKRNPERVKGIAFMEFIRRIPTWDEWPEFARETFQAFRTTDVGRKLIIDQNVFIEGTLPMGVVRPLTEVEMDHYREPFLNPVDREPLWRFPNELPIAGEPANIVALVEEYMDWLHQSPVPKLLFWGTPGVLIPPAEAARLAKSLPNCKAVDIGPGLNLLQEDNPDLIGSEIARWLSTLEISG

SEQ ID NO: 1863 - protein, 277 aa, Synthetic construct
MFHYVDVGPRDGTPVLFLHGNPTSSYVWRNIIPHVAPTHRCIAPDLIGMGKSDKPDLGYFFDDHVRFMDAFIEALGLEEVVLVIHDWGSALGFHWAKRNPERVKGIAFMEFIRSIPTWDEWPEFARETFQAFRTTDVGRKLIIDQNVFIEGTLPMGVVRPLTEVEMDHYREPFLNPVDREPLWRFPNELPIAGEPANIVALVEEYMDWLHQSPVPKLLFWGTPGVLIPPAEAARLAKSLPNCKAVDIGPGLNLLQEDNPDLIGSEIARWLSTLEISG

SEQ ID NO: 1864 - protein, 277 aa, Synthetic construct
MFHYVDVGPRDGTPVLFLHGNPTSSYVWRNIIPHVAPTHRCIAPDLIGMGKSDKPDLGYFFDDHVRFMDAFIEALGLEEVVLVIHDWGSALGFHWAKRNPERVKGIAFMEFIRQIPTWDEWPEFARETFQAFRTTDVGRKLIIDQNVFIEGTLPMGVVRPLTEVEMDHYREPFLNPVDREPLWRFPNELPIAGEPANIVALVEEYMDWLHQSPVPKLLFWGTPGVLIPPAEAARLAKSLPNCKAVDIGPGLNLLQEDNPDLIGSEIARWLSTLEISG

SEQ ID NO: 1865 - protein, 277 aa, Synthetic construct
MFHYVDVGPRDGTPVLFLHGNPTSSYVWRNIIPHVAPTHRCIAPDLIGMGKSDKPDLGYFFDDHVRFMDAFIEALGLEEVVLVIHDWGSALGFHWAKRNPERVKGIAFMEFIRLIPTWDEWPEFARETFQAFRTTDVGRKLIIDQNVFIEGTLPMGVVRPLTEVEMDHYREPFLNPVDREPLWRFPNELPIAGEPANIVALVEEYMDWLHQSPVPKLLFWGTPGVLIPPAEAARLAKSLPNCKAVDIGPGLNLLQEDNPDLIGSEIARWLSTLEISG

SEQ ID NO: 1866 - protein, 277 aa, Synthetic construct
MFHYVDVGPRDGTPVLFLHGNPTSSYVWRNIIPHVAPTHRCIAPDLIGMGKSDKPDLGYFFDDHVRFMDAFIEALGLEEVVLVIHDWGSALGFHWAKRNPERVKGIAFMEFIRPLPTWDEWPEFARETFQAFRTTDVGRKLIIDQNVFIEGTLPMGVVRPLTEVEMDHYREPFLNPVDREPLWRFPNELPIAGEPANIVALVEEYMDWLHQSPVPKLLFWGTPGVLIPPAEAARLAKSLPNCKAVDIGPGLNLLQEDNPDLIGSEIARWLSTLEISG

SEQ ID NO: 1867 - protein, 277 aa, Synthetic construct
MFHYVDVGPRDGTPVLFLHGNPTSSYVWRNIIPHVAPTHRCIAPDLIGMGKSDKPDLGYFFDDHVRFMDAFIEALGLEEVVLVIHDWGSALGFHWAKRNPERVKGIAFMEFIRPMPTWDEWPEFARETFQAFRTTDVGRKLIIDQNVFIEGTLPMGVVRPLTEVEMDHYREPFLNPVDREPLWRFPNELPIAGEPANIVALVEEYMDWLHQSPVPKLLFWGTPGVLIPPAEAARLAKSLPNCKAVDIGPGLNLLQEDNPDLIGSEIARWLSTLEISG

SEQ ID NO: 1868 - protein, 277 aa, Synthetic construct
MFHYVDVGPRDGTPVLFLHGNPTSSYVWRNIIPHVAPTHRCIAPDLIGMGKSDKPDLGYFFDDHVRFMDAFIEALGLEEVVLVIHDWGSALGFHWAKRNPERVKGIAFMEFIRPFPTWDEWPEFARETFQAFRTTDVGRKLIIDQNVFIEGTLPMGVVRPLTEVEMDHYREPFLNPVDREPLWRFPNELPIAGEPANIVALVEEYMDWLHQSPVPKLLFWGTPGVLIPPAEAARLAKSLPNCKAVDIGPGLNLLQEDNPDLIGSEIARWLSTLEISG

SEQ ID NO: 1869 - protein, 277 aa, Synthetic construct
MFHYVDVGPRDGTPVLFLHGNPTSSYVWRNIIPHVAPTHRCIAPDLIGMGKSDKPDLGYFFDDHVRFMDAFIEALGLEEVVLVIHDWGSALGFHWAKRNPERVKGIAFMEFIRPVPTWDEWPEFARETFQAFRTTDVGRKLIIDQNVFIEGTLPMGVVRPLTEVEMDHYREPFLNPVDREPLWRFPNELPIAGEPANIVALVEEYMDWLHQSPVPKLLFWGTPGVLIPPAEAARLAKSLPNCKAVDIGPGLNLLQEDNPDLIGSEIARWLSTLEISG

SEQ ID NO: 1870 - protein, 277 aa, Synthetic construct
MFHYVDVGPRDGTPVLFLHGNPTSSYVWRNIIPHVAPTHRCIAPDLIGMGKSDKPDLGYFFDDHVRFMDAFIEALGLEEVVLVIHDWGSALGFHWAKRNPERVKGIAFMEFIRPTPTWDEWPEFARETFQAFRTTDVGRKLIIDQNVFIEGTLPMGVVRPLTEVEMDHYREPFLNPVDREPLWRFPNELPIAGEPANIVALVEEYMDWLHQSPVPKLLFWGTPGVLIPPAEAARLAKSLPNCKAVDIGPGLNLLQEDNPDLIGSEIARWLSTLEISG

SEQ ID NO: 1871 - protein, 277 aa, Synthetic construct
MFHYVDVGPRDGTPVLFLHGNPTSSYVWRNIIPHVAPTHRCIAPDLIGMGKSDKPDLGYFFDDHVRFMDAFIEALGLEEVVLVIHDWGSALGFHWAKRNPERVKGIAFMEFIRPAPTWDEWPEFARETFQAFRTTDVGRKLIIDQNVFIEGTLPMGVVRPLTEVEMDHYREPFLNPVDREPLWRFPNELPIAGEPANIVALVEEYMDWLHQSPVPKLLFWGTPGVLIPPAEAARLAKSLPNCKAVDIGPGLNLLQEDNPDLIGSEIARWLSTLEISG

SEQ ID NO: 1872 - protein, 277 aa, Synthetic construct
MFHYVDVGPRDGTPVLFLHGNPTSSYVWRNIIPHVAPTHRCIAPDLIGMGKSDKPDLGYFFDDHVRFMDAFIEALGLEEVVLVIHDWGSALGFHWAKRNPERVKGIAFMEFIRPIATWDEWPEFARETFQAFRTTDVGRKLIIDQNVFIEGTLPMGVVRPLTEVEMDHYREPFLNPVDREPLWRFPNELPIAGEPANIVALVEEYMDWLHQSPVPKLLFWGTPGVLIPPAEAARLAKSLPNCKAVDIGPGLNLLQEDNPDLIGSEIARWLSTLEISG

SEQ ID NO: 1873 - protein, 277 aa, Synthetic construct
MFHYVDVGPRDGTPVLFLHGNPTSSYVWRNIIPHVAPTHRCIAPDLIGMGKSDKPDLGYFFDDHVRFMDAFIEALGLEEVVLVIHDWGSALGFHWAKRNPERVKGIAFMEFIRPILTWDEWPEFARETFQAFRTTDVGRKLIIDQNVFIEGTLPMGVVRPLTEVEMDHYREPFLNPVDREPLWRFPNELPIAGEPANIVALVEEYMDWLHQSPVPKLLFWGTPGVLIPPAEAARLAKSLPNCKAVDIGPGLNLLQEDNPDLIGSEIARWLSTLEISG

SEQ ID NO: 1874 - protein, 277 aa, Synthetic construct
MFHYVDVGPRDGTPVLFLHGNPTSSYVWRNIIPHVAPTHRCIAPDLIGMGKSDKPDLGYFFDDHVRFMDAFIEALGLEEVVLVIHDWGSALGFHWAKRNPERVKGIAFMEFIRPITTWDEWPEFARETFQAFRTTDVGRKLIIDQNVFIEGTLPMGVVRPLTEVEMDHYREPFLNPVDREPLWRFPNELPIAGEPANIVALVEEYMDWLHQSPVPKLLFWGTPGVLIPPAEAARLAKSLPNCKAVDIGPGLNLLQEDNPDLIGSEIARWLSTLEISG

SEQ ID NO: 1875 - protein, 277 aa, Synthetic construct
MFHYVDVGPRDGTPVLFLHGNPTSSYVWRNIIPHVAPTHRCIAPDLIGMGKSDKPDLGYFFDDHVRFMDAFIEALGLEEVVLVIHDWGSALGFHWAKRNPERVKGIAFMEFIRPIVTWDEWPEFARETFQAFRTTDVGRKLIIDQNVFIEGTLPMGVVRPLTEVEMDHYREPFLNPVDREPLWRFPNELPIAGEPANIVALVEEYMDWLHQSPVPKLLFWGTPGVLIPPAEAARLAKSLPNCKAVDIGPGLNLLQEDNPDLIGSEIARWLSTLEISG

SEQ ID NO: 1876 - protein, 277 aa, Synthetic construct
MFHYVDVGPRDGTPVLFLHGNPTSSYVWRNIIPHVAPTHRCIAPDLIGMGKSDKPDLGYFFDDHVRFMDAFIEALGLEEVVLVIHDWGSALGFHWAKRNPERVKGIAFMEFIRPIGTWDEWPEFARETFQAFRTTDVGRKLIIDQNVFIEGTLPMGVVRPLTEVEMDHYREPFLNPVDREPLWRFPNELPIAGEPANIVALVEEYMDWLHQSPVPKLLFWGTPGVLIPPAEAARLAKSLPNCKAVDIGPGLNLLQEDNPDLIGSEIARWLSTLEISG

SEQ ID NO: 1877 - protein, 277 aa, Synthetic construct
MFHYVDVGPRDGTPVLFLHGNPTSSYVWRNIIPHVAPTHRCIAPDLIGMGKSDKPDLGYFFDDHVRFMDAFIEALGLEEVVLVIHDWGSALGFHWAKRNPERVKGIAFMEFIRPISTWDEWPEFARETFQAFRTTDVGRKLIIDQNVFIEGTLPMGVVRPLTEVEMDHYREPFLNPVDREPLWRFPNELPIAGEPANIVALVEEYMDWLHQSPVPKLLFWGTPGVLIPPAEAARLAKSLPNCKAVDIGPGLNLLQEDNPDLIGSEIARWLSTLEISG

SEQ ID NO: 1878 - protein, 277 aa, Synthetic construct
MFHYVDVGPRDGTPVLFLHGNPTSSYVWRNIIPHVAPTHRCIAPDLIGMGKSDKPDLGYFFDDHVRFMDAFIEALGLEEVVLVIHDWGSALGFHWAKRNPERVKGIAFMEFIRPIPSWDEWPEFARETFQAFRTTDVGRKLIIDQNVFIEGTLPMGVVRPLTEVEMDHYREPFLNPVDREPLWRFPNELPIAGEPANIVALVEEYMDWLHQSPVPKLLFWGTPGVLIPPAEAARLAKSLPNCKAVDIGPGLNLLQEDNPDLIGSEIARWLSTLEISG

SEQ ID NO: 1879 - protein, 277 aa, Synthetic construct
MFHYVDVGPRDGTPVLFLHGNPTSSYVWRNIIPHVAPTHRCIAPDLIGMGKSDKPDLGYFFDDHVRFMDAFIEALGLEEVVLVIHDWGSALGFHWAKRNPERVKGIAFMEFIRPIPRWDEWPEFARETFQAFRTTDVGRKLIIDQNVFIEGTLPMGVVRPLTEVEMDHYREPFLNPVDREPLWRFPNELPIAGEPANIVALVEEYMDWLHQSPVPKLLFWGTPGVLIPPAEAARLAKSLPNCKAVDIGPGLNLLQEDNPDLIGSEIARWLSTLEISG

SEQ ID NO: 1880 - protein, 277 aa, Synthetic construct
MFHYVDVGPRDGTPVLFLHGNPTSSYVWRNIIPHVAPTHRCIAPDLIGMGKSDKPDLGYFFDDHVRFMDAFIEALGLEEVVLVIHDWGSALGFHWAKRNPERVKGIAFMEFIRPIPNWDEWPEFARETFQAFRTTDVGRKLIIDQNVFIEGTLPMGVVRPLTEVEMDHYREPFLNPVDREPLWRFPNELPIAGEPANIVALVEEYMDWLHQSPVPKLLFWGTPGVLIPPAEAARLAKSLPNCKAVDIGPGLNLLQEDNPDLIGSEIARWLSTLEISG

SEQ ID NO: 1881 - protein, 277 aa, Synthetic construct
MFHYVDVGPRDGTPVLFLHGNPTSSYVWRNIIPHVAPTHRCIAPDLIGMGKSDKPDLGYFFDDHVRFMDAFIEALGLEEVVLVIHDWGSALGFHWAKRNPERVKGIAFMEFIRPIPGWDEWPEFARETFQAFRTTDVGRKLIIDQNVFIEGTLPMGVVRPLTEVEMDHYREPFLNPVDREPLWRFPNELPIAGEPANIVALVEEYMDWLHQSPVPKLLFWGTPGVLIPPAEAARLAKSLPNCKAVDIGPGLNLLQEDNPDLIGSEIARWLSTLEISG

SEQ ID NO: 1882 - protein, 277 aa, Synthetic construct
MFHYVDVGPRDGTPVLFLHGNPTSSYVWRNIIPHVAPTHRCIAPDLIGMGKSDKPDLGYFFDDHVRFMDAFIEALGLEEVVLVIHDWGSALGFHWAKRNPERVKGIAFMEFIRPIPAWDEWPEFARETFQAFRTTDVGRKLIIDQNVFIEGTLPMGVVRPLTEVEMDHYREPFLNPVDREPLWRFPNELPIAGEPANIVALVEEYMDWLHQSPVPKLLFWGTPGVLIPPAEAARLAKSLPNCKAVDIGPGLNLLQEDNPDLIGSEIARWLSTLEISG

SEQ ID NO: 1883 - protein, 277 aa, Synthetic construct
MFHYVDVGPRDGTPVLFLHGNPTSSYVWRNIIPHVAPTHRCIAPDLIGMGKSDKPDLGYFFDDHVRFMDAFIEALGLEEVVLVIHDWGSALGFHWAKRNPERVKGIAFMEFIRPIPDWDEWPEFARETFQAFRTTDVGRKLIIDQNVFIEGTLPMGVVRPLTEVEMDHYREPFLNPVDREPLWRFPNELPIAGEPANIVALVEEYMDWLHQSPVPKLLFWGTPGVLIPPAEAARLAKSLPNCKAVDIGPGLNLLQEDNPDLIGSEIARWLSTLEISG

SEQ ID NO: 1884 - protein, 277 aa, Synthetic construct
MFHYVDVGPRDGTPVLFLHGNPTSSYVWRNIIPHVAPTHRCIAPDLIGMGKSDKPDLGYFFDDHVRFMDAFIEALGLEEVVLVIHDWGSALGFHWAKRNPERVKGIAFMEFIRPIPTFDEWPEFARETFQAFRTTDVGRKLIIDQNVFIEGTLPMGVVRPLTEVEMDHYREPFLNPVDREPLWRFPNELPIAGEPANIVALVEEYMDWLHQSPVPKLLFWGTPGVLIPPAEAARLAKSLPNCKAVDIGPGLNLLQEDNPDLIGSEIARWLSTLEISG

SEQ ID NO: 1885 - protein, 277 aa, Synthetic construct
MFHYVDVGPRDGTPVLFLHGNPTSSYVWRNIIPHVAPTHRCIAPDLIGMGKSDKPDLGYFFDDHVRFMDAFIEALGLEEVVLVIHDWGSALGFHWAKRNPERVKGIAFMEFIRPIPTYDEWPEFARETFQAFRTTDVGRKLIIDQNVFIEGTLPMGVVRPLTEVEMDHYREPFLNPVDREPLWRFPNELPIAGEPANIVALVEEYMDWLHQSPVPKLLFWGTPGVLIPPAEAARLAKSLPNCKAVDIGPGLNLLQEDNPDLIGSEIARWLSTLEISG

SEQ ID NO: 1886 - protein, 277 aa, Synthetic construct
MFHYVDVGPRDGTPVLFLHGNPTSSYVWRNIIPHVAPTHRCIAPDLIGMGKSDKPDLGYFFDDHVRFMDAFIEALGLEEVVLVIHDWGSALGFHWAKRNPERVKGIAFMEFIRPIPTLDEWPEFARETFQAFRTTDVGRKLIIDQNVFIEGTLPMGVVRPLTEVEMDHYREPFLNPVDREPLWRFPNELPIAGEPANIVALVEEYMDWLHQSPVPKLLFWGTPGVLIPPAEAARLAKSLPNCKAVDIGPGLNLLQEDNPDLIGSEIARWLSTLEISG

SEQ ID NO: 1887 - protein, 277 aa, Synthetic construct
MFHYVDVGPRDGTPVLFLHGNPTSSYVWRNIIPHVAPTHRCIAPDLIGMGKSDKPDLGYFFDDHVRFMDAFIEALGLEEVVLVIHDWGSALGFHWAKRNPERVKGIAFMEFIRPIPTADEWPEFARETFQAFRTTDVGRKLIIDQNVFIEGTLPMGVVRPLTEVEMDHYREPFLNPVDREPLWRFPNELPIAGEPANIVALVEEYMDWLHQSPVPKLLFWGTPGVLIPPAEAARLAKSLPNCKAVDIGPGLNLLQEDNPDLIGSEIARWLSTLEISG

SEQ ID NO: 1888 - protein, 277 aa, Synthetic construct
MFHYVDVGPRDGTPVLFLHGNPTSSYVWRNIIPHVAPTHRCIAPDLIGMGKSDKPDLGYFFDDHVRFMDAFIEALGLEEVVLVIHDWGSALGFHWAKRNPERVKGIAFMEFIRPIPTRDEWPEFARETFQAFRTTDVGRKLIIDQNVFIEGTLPMGVVRPLTEVEMDHYREPFLNPVDREPLWRFPNELPIAGEPANIVALVEEYMDWLHQSPVPKLLFWGTPGVLIPPAEAARLAKSLPNCKAVDIGPGLNLLQEDNPDLIGSEIARWLSTLEISG

SEQ ID NO: 1889 - protein, 277 aa, Synthetic construct
MFHYVDVGPRDGTPVLFLHGNPTSSYVWRNIIPHVAPTHRCIAPDLIGMGKSDKPDLGYFFDDHVRFMDAFIEALGLEEVVLVIHDWGSALGFHWAKRNPERVKGIAFMEFIRPIPTMDEWPEFARETFQAFRTTDVGRKLIIDQNVFIEGTLPMGVVRPLTEVEMDHYREPFLNPVDREPLWRFPNELPIAGEPANIVALVEEYMDWLHQSPVPKLLFWGTPGVLIPPAEAARLAKSLPNCKAVDIGPGLNLLQEDNPDLIGSEIARWLSTLEISG

SEQ ID NO: 1890 - protein, 277 aa, Synthetic construct
MFHYVDVGPRDGTPVLFLHGNPTSSYVWRNIIPHVAPTHRCIAPDLIGMGKSDKPDLGYFFDDHVRFMDAFIEALGLEEVVLVIHDWGSALGFHWAKRNPERVKGIAFMEFIRPIPTWEEWPEFARETFQAFRTTDVGRKLIIDQNVFIEGTLPMGVVRPLTEVEMDHYREPFLNPVDREPLWRFPNELPIAGEPANIVALVEEYMDWLHQSPVPKLLFWGTPGVLIPPAEAARLAKSLPNCKAVDIGPGLNLLQEDNPDLIGSEIARWLSTLEISG

SEQ ID NO: 1891 - protein, 277 aa, Synthetic construct
MFHYVDVGPRDGTPVLFLHGNPTSSYVWRNIIPHVAPTHRCIAPDLIGMGKSDKPDLGYFFDDHVRFMDAFIEALGLEEVVLVIHDWGSALGFHWAKRNPERVKGIAFMEFIRPIPTWAEWPEFARETFQAFRTTDVGRKLIIDQNVFIEGTLPMGVVRPLTEVEMDHYREPFLNPVDREPLWRFPNELPIAGEPANIVALVEEYMDWLHQSPVPKLLFWGTPGVLIPPAEAARLAKSLPNCKAVDIGPGLNLLQEDNPDLIGSEIARWLSTLEISG

SEQ ID NO: 1892 - protein, 277 aa, Synthetic construct
MFHYVDVGPRDGTPVLFLHGNPTSSYVWRNIIPHVAPTHRCIAPDLIGMGKSDKPDLGYFFDDHVRFMDAFIEALGLEEVVLVIHDWGSALGFHWAKRNPERVKGIAFMEFIRPIPTWSEWPEFARETFQAFRTTDVGRKLIIDQNVFIEGTLPMGVVRPLTEVEMDHYREPFLNPVDREPLWRFPNELPIAGEPANIVALVEEYMDWLHQSPVPKLLFWGTPGVLIPPAEAARLAKSLPNCKAVDIGPGLNLLQEDNPDLIGSEIARWLSTLEISG

SEQ ID NO: 1893 - protein, 277 aa, Synthetic construct
MFHYVDVGPRDGTPVLFLHGNPTSSYVWRNIIPHVAPTHRCIAPDLIGMGKSDKPDLGYFFDDHVRFMDAFIEALGLEEVVLVIHDWGSALGFHWAKRNPERVKGIAFMEFIRPIPTWNEWPEFARETFQAFRTTDVGRKLIIDQNVFIEGTLPMGVVRPLTEVEMDHYREPFLNPVDREPLWRFPNELPIAGEPANIVALVEEYMDWLHQSPVPKLLFWGTPGVLIPPAEAARLAKSLPNCKAVDIGPGLNLLQEDNPDLIGSEIARWLSTLEISG

SEQ ID NO: 1894 - protein, 277 aa, Synthetic construct
MFHYVDVGPRDGTPVLFLHGNPTSSYVWRNIIPHVAPTHRCIAPDLIGMGKSDKPDLGYFFDDHVRFMDAFIEALGLEEVVLVIHDWGSALGFHWAKRNPERVKGIAFMEFIRPIPTWQEWPEFARETFQAFRTTDVGRKLIIDQNVFIEGTLPMGVVRPLTEVEMDHYREPFLNPVDREPLWRFPNELPIAGEPANIVALVEEYMDWLHQSPVPKLLFWGTPGVLIPPAEAARLAKSLPNCKAVDIGPGLNLLQEDNPDLIGSEIARWLSTLEISG

SEQ ID NO: 1895 - protein, 277 aa, Synthetic construct
MFHYVDVGPRDGTPVLFLHGNPTSSYVWRNIIPHVAPTHRCIAPDLIGMGKSDKPDLGYFFDDHVRFMDAFIEALGLEEVVLVIHDWGSALGFHWAKRNPERVKGIAFMEFIRPIPTWGEWPEFARETFQAFRTTDVGRKLIIDQNVFIEGTLPMGVVRPLTEVEMDHYREPFLNPVDREPLWRFPNELPIAGEPANIVALVEEYMDWLHQSPVPKLLFWGTPGVLIPPAEAARLAKSLPNCKAVDIGPGLNLLQEDNPDLIGSEIARWLSTLEISG

SEQ ID NO: 1896 - protein, 277 aa, Synthetic construct
MFHYVDVGPRDGTPVLFLHGNPTSSYVWRNIIPHVAPTHRCIAPDLIGMGKSDKPDLGYFFDDHVRFMDAFIEALGLEEVVLVIHDWGSALGFHWAKRNPERVKGIAFMEFIRPIPTWDDWPEFARETFQAFRTTDVGRKLIIDQNVFIEGTLPMGVVRPLTEVEMDHYREPFLNPVDREPLWRFPNELPIAGEPANIVALVEEYMDWLHQSPVPKLLFWGTPGVLIPPAEAARLAKSLPNCKAVDIGPGLNLLQEDNPDLIGSEIARWLSTLEISG

SEQ ID NO: 1897 - protein, 277 aa, Synthetic construct
MFHYVDVGPRDGTPVLFLHGNPTSSYVWRNIIPHVAPTHRCIAPDLIGMGKSDKPDLGYFFDDHVRFMDAFIEALGLEEVVLVIHDWGSALGFHWAKRNPERVKGIAFMEFIRPIPTWDQWPEFARETFQAFRTTDVGRKLIIDQNVFIEGTLPMGVVRPLTEVEMDHYREPFLNPVDREPLWRFPNELPIAGEPANIVALVEEYMDWLHQSPVPKLLFWGTPGVLIPPAEAARLAKSLPNCKAVDIGPGLNLLQEDNPDLIGSEIARWLSTLEISG

SEQ ID NO: 1898 - protein, 277 aa, Synthetic construct
MFHYVDVGPRDGTPVLFLHGNPTSSYVWRNIIPHVAPTHRCIAPDLIGMGKSDKPDLGYFFDDHVRFMDAFIEALGLEEVVLVIHDWGSALGFHWAKRNPERVKGIAFMEFIRPIPTWDAWPEFARETFQAFRTTDVGRKLIIDQNVFIEGTLPMGVVRPLTEVEMDHYREPFLNPVDREPLWRFPNELPIAGEPANIVALVEEYMDWLHQSPVPKLLFWGTPGVLIPPAEAARLAKSLPNCKAVDIGPGLNLLQEDNPDLIGSEIARWLSTLEISG

SEQ ID NO: 1899 - protein, 277 aa, Synthetic construct
MFHYVDVGPRDGTPVLFLHGNPTSSYVWRNIIPHVAPTHRCIAPDLIGMGKSDKPDLGYFFDDHVRFMDAFIEALGLEEVVLVIHDWGSALGFHWAKRNPERVKGIAFMEFIRPIPTWDTWPEFARETFQAFRTTDVGRKLIIDQNVFIEGTLPMGVVRPLTEVEMDHYREPFLNPVDREPLWRFPNELPIAGEPANIVALVEEYMDWLHQSPVPKLLFWGTPGVLIPPAEAARLAKSLPNCKAVDIGPGLNLLQEDNPDLIGSEIARWLSTLEISG

SEQ ID NO: 1900 - protein, 277 aa, Synthetic construct
MFHYVDVGPRDGTPVLFLHGNPTSSYVWRNIIPHVAPTHRCIAPDLIGMGKSDKPDLGYFFDDHVRFMDAFIEALGLEEVVLVIHDWGSALGFHWAKRNPERVKGIAFMEFIRPIPTWDSWPEFARETFQAFRTTDVGRKLIIDQNVFIEGTLPMGVVRPLTEVEMDHYREPFLNPVDREPLWRFPNELPIAGEPANIVALVEEYMDWLHQSPVPKLLFWGTPGVLIPPAEAARLAKSLPNCKAVDIGPGLNLLQEDNPDLIGSEIARWLSTLEISG

SEQ ID NO: 1901 - protein, 277 aa, Synthetic construct
MFHYVDVGPRDGTPVLFLHGNPTSSYVWRNIIPHVAPTHRCIAPDLIGMGKSDKPDLGYFFDDHVRFMDAFIEALGLEEVVLVIHDWGSALGFHWAKRNPERVKGIAFMEFIRPIPTWDKWPEFARETFQAFRTTDVGRKLIIDQNVFIEGTLPMGVVRPLTEVEMDHYREPFLNPVDREPLWRFPNELPIAGEPANIVALVEEYMDWLHQSPVPKLLFWGTPGVLIPPAEAARLAKSLPNCKAVDIGPGLNLLQEDNPDLIGSEIARWLSTLEISG

SEQ ID NO: 1902 - protein, 277 aa, Synthetic construct
MFHYVDVGPRDGTPVLFLHGNPTSSYVWRNIIPHVAPTHRCIAPDLIGMGKSDKPDLGYFFDDHVRFMDAFIEALGLEEVVLVIHDWGSALGFHWAKRNPERVKGIAFMEFIRPIPTWDEFPEFARETFQAFRTTDVGRKLIIDQNVFIEGTLPMGVVRPLTEVEMDHYREPFLNPVDREPLWRFPNELPIAGEPANIVALVEEYMDWLHQSPVPKLLFWGTPGVLIPPAEAARLAKSLPNCKAVDIGPGLNLLQEDNPDLIGSEIARWLSTLEISG

SEQ ID NO: 1903 - protein, 277 aa, Synthetic construct
MFHYVDVGPRDGTPVLFLHGNPTSSYVWRNIIPHVAPTHRCIAPDLIGMGKSDKPDLGYFFDDHVRFMDAFIEALGLEEVVLVIHDWGSALGFHWAKRNPERVKGIAFMEFIRPIPTWDELPEFARETFQAFRTTDVGRKLIIDQNVFIEGTLPMGVVRPLTEVEMDHYREPFLNPVDREPLWRFPNELPIAGEPANIVALVEEYMDWLHQSPVPKLLFWGTPGVLIPPAEAARLAKSLPNCKAVDIGPGLNLLQEDNPDLIGSEIARWLSTLEISG

SEQ ID NO: 1904 - protein, 277 aa, Synthetic construct
MFHYVDVGPRDGTPVLFLHGNPTSSYVWRNIIPHVAPTHRCIAPDLIGMGKSDKPDLGYFFDDHVRFMDAFIEALGLEEVVLVIHDWGSALGFHWAKRNPERVKGIAFMEFIRPIPTWDEMPEFARETFQAFRTTDVGRKLIIDQNVFIEGTLPMGVVRPLTEVEMDHYREPFLNPVDREPLWRFPNELPIAGEPANIVALVEEYMDWLHQSPVPKLLFWGTPGVLIPPAEAARLAKSLPNCKAVDIGPGLNLLQEDNPDLIGSEIARWLSTLEISG

SEQ ID NO: 1905 - protein, 277 aa, Synthetic construct
MFHYVDVGPRDGTPVLFLHGNPTSSYVWRNIIPHVAPTHRCIAPDLIGMGKSDKPDLGYFFDDHVRFMDAFIEALGLEEVVLVIHDWGSALGFHWAKRNPERVKGIAFMEFIRPIPTWDEYPEFARETFQAFRTTDVGRKLIIDQNVFIEGTLPMGVVRPLTEVEMDHYREPFLNPVDREPLWRFPNELPIAGEPANIVALVEEYMDWLHQSPVPKLLFWGTPGVLIPPAEAARLAKSLPNCKAVDIGPGLNLLQEDNPDLIGSEIARWLSTLEISG

SEQ ID NO: 1906 - protein, 277 aa, Synthetic construct
MFHYVDVGPRDGTPVLFLHGNPTSSYVWRNIIPHVAPTHRCIAPDLIGMGKSDKPDLGYFFDDHVRFMDAFIEALGLEEVVLVIHDWGSALGFHWAKRNPERVKGIAFMEFIRPIPTWDEIPEFARETFQAFRTTDVGRKLIIDQNVFIEGTLPMGVVRPLTEVEMDHYREPFLNPVDREPLWRFPNELPIAGEPANIVALVEEYMDWLHQSPVPKLLFWGTPGVLIPPAEAARLAKSLPNCKAVDIGPGLNLLQEDNPDLIGSEIARWLSTLEISG

SEQ ID NO: 1907 - protein, 277 aa, Synthetic construct
MFHYVDVGPRDGTPVLFLHGNPTSSYVWRNIIPHVAPTHRCIAPDLIGMGKSDKPDLGYFFDDHVRFMDAFIEALGLEEVVLVIHDWGSALGFHWAKRNPERVKGIAFMEFIRPIPTWDEVPEFARETFQAFRTTDVGRKLIIDQNVFIEGTLPMGVVRPLTEVEMDHYREPFLNPVDREPLWRFPNELPIAGEPANIVALVEEYMDWLHQSPVPKLLFWGTPGVLIPPAEAARLAKSLPNCKAVDIGPGLNLLQEDNPDLIGSEIARWLSTLEISG

SEQ ID NO: 1908 - protein, 277 aa, Synthetic construct
MFHYVDVGPRDGTPVLFLHGNPTSSYVWRNIIPHVAPTHRCIAPDLIGMGKSDKPDLGYFFDDHVRFMDAFIEALGLEEVVLVIHDWGSALGFHWAKRNPERVKGIAFMEFIRPIPTWDEWSEFARETFQAFRTTDVGRKLIIDQNVFIEGTLPMGVVRPLTEVEMDHYREPFLNPVDREPLWRFPNELPIAGEPANIVALVEEYMDWLHQSPVPKLLFWGTPGVLIPPAEAARLAKSLPNCKAVDIGPGLNLLQEDNPDLIGSEIARWLSTLEISG

SEQ ID NO: 1909 - protein, 277 aa, Synthetic construct
MFHYVDVGPRDGTPVLFLHGNPTSSYVWRNIIPHVAPTHRCIAPDLIGMGKSDKPDLGYFFDDHVRFMDAFIEALGLEEVVLVIHDWGSALGFHWAKRNPERVKGIAFMEFIRPIPTWDEWGEFARETFQAFRTTDVGRKLIIDQNVFIEGTLPMGVVRPLTEVEMDHYREPFLNPVDREPLWRFPNELPIAGEPANIVALVEEYMDWLHQSPVPKLLFWGTPGVLIPPAEAARLAKSLPNCKAVDIGPGLNLLQEDNPDLIGSEIARWLSTLEISG

SEQ ID NO: 1910 - protein, 277 aa, Synthetic construct
MFHYVDVGPRDGTPVLFLHGNPTSSYVWRNIIPHVAPTHRCIAPDLIGMGKSDKPDLGYFFDDHVRFMDAFIEALGLEEVVLVIHDWGSALGFHWAKRNPERVKGIAFMEFIRPIPTWDEWTEFARETFQAFRTTDVGRKLIIDQNVFIEGTLPMGVVRPLTEVEMDHYREPFLNPVDREPLWRFPNELPIAGEPANIVALVEEYMDWLHQSPVPKLLFWGTPGVLIPPAEAARLAKSLPNCKAVDIGPGLNLLQEDNPDLIGSEIARWLSTLEISG

SEQ ID NO: 1911 - protein, 277 aa, Synthetic construct
MFHYVDVGPRDGTPVLFLHGNPTSSYVWRNIIPHVAPTHRCIAPDLIGMGKSDKPDLGYFFDDHVRFMDAFIEALGLEEVVLVIHDWGSALGFHWAKRNPERVKGIAFMEFIRPIPTWDEWDEFARETFQAFRTTDVGRKLIIDQNVFIEGTLPMGVVRPLTEVEMDHYREPFLNPVDREPLWRFPNELPIAGEPANIVALVEEYMDWLHQSPVPKLLFWGTPGVLIPPAEAARLAKSLPNCKAVDIGPGLNLLQEDNPDLIGSEIARWLSTLEISG

SEQ ID NO: 1912 - protein, 277 aa, Synthetic construct
MFHYVDVGPRDGTPVLFLHGNPTSSYVWRNIIPHVAPTHRCIAPDLIGMGKSDKPDLGYFFDDHVRFMDAFIEALGLEEVVLVIHDWGSALGFHWAKRNPERVKGIAFMEFIRPIPTWDEWAEFARETFQAFRTTDVGRKLIIDQNVFIEGTLPMGVVRPLTEVEMDHYREPFLNPVDREPLWRFPNELPIAGEPANIVALVEEYMDWLHQSPVPKLLFWGTPGVLIPPAEAARLAKSLPNCKAVDIGPGLNLLQEDNPDLIGSEIARWLSTLEISG

SEQ ID NO: 1913 - protein, 277 aa, Synthetic construct
MFHYVDVGPRDGTPVLFLHGNPTSSYVWRNIIPHVAPTHRCIAPDLIGMGKSDKPDLGYFFDDHVRFMDAFIEALGLEEVVLVIHDWGSALGFHWAKRNPERVKGIAFMEFIRPIPTWDEWNEFARETFQAFRTTDVGRKLIIDQNVFIEGTLPMGVVRPLTEVEMDHYREPFLNPVDREPLWRFPNELPIAGEPANIVALVEEYMDWLHQSPVPKLLFWGTPGVLIPPAEAARLAKSLPNCKAVDIGPGLNLLQEDNPDLIGSEIARWLSTLEISG

SEQ ID NO: 1914 - protein, 277 aa, Synthetic construct
MFHYVDVGPRDGTPVLFLHGNPTSSYVWRNIIPHVAPTHRCIAPDLIGMGKSDKPDLGYFFDDHVRFMDAFIEALGLEEVVLVIHDWGSALGFHWAKRNPERVKGIAFMEFIRPIPTWDEWPDFARETFQAFRTTDVGRKLIIDQNVFIEGTLPMGVVRPLTEVEMDHYREPFLNPVDREPLWRFPNELPIAGEPANIVALVEEYMDWLHQSPVPKLLFWGTPGVLIPPAEAARLAKSLPNCKAVDIGPGLNLLQEDNPDLIGSEIARWLSTLEISG

SEQ ID NO: 1915 - protein, 277 aa, Synthetic construct
MFHYVDVGPRDGTPVLFLHGNPTSSYVWRNIIPHVAPTHRCIAPDLIGMGKSDKPDLGYFFDDHVRFMDAFIEALGLEEVVLVIHDWGSALGFHWAKRNPERVKGIAFMEFIRPIPTWDEWPAFARETFQAFRTTDVGRKLIIDQNVFIEGTLPMGVVRPLTEVEMDHYREPFLNPVDREPLWRFPNELPIAGEPANIVALVEEYMDWLHQSPVPKLLFWGTPGVLIPPAEAARLAKSLPNCKAVDIGPGLNLLQEDNPDLIGSEIARWLSTLEISG

SEQ ID NO: 1916 - protein, 277 aa, Synthetic construct
MFHYVDVGPRDGTPVLFLHGNPTSSYVWRNIIPHVAPTHRCIAPDLIGMGKSDKPDLGYFFDDHVRFMDAFIEALGLEEVVLVIHDWGSALGFHWAKRNPERVKGIAFMEFIRPIPTWDEWPPFARETFQAFRTTDVGRKLIIDQNVFIEGTLPMGVVRPLTEVEMDHYREPFLNPVDREPLWRFPNELPIAGEPANIVALVEEYMDWLHQSPVPKLLFWGTPGVLIPPAEAARLAKSLPNCKAVDIGPGLNLLQEDNPDLIGSEIARWLSTLEISG

SEQ ID NO: 1917 - protein, 277 aa, Synthetic construct
MFHYVDVGPRDGTPVLFLHGNPTSSYVWRNIIPHVAPTHRCIAPDLIGMGKSDKPDLGYFFDDHVRFMDAFIEALGLEEVVLVIHDWGSALGFHWAKRNPERVKGIAFMEFIRPIPTWDEWPQFARETFQAFRTTDVGRKLIIDQNVFIEGTLPMGVVRPLTEVEMDHYREPFLNPVDREPLWRFPNELPIAGEPANIVALVEEYMDWLHQSPVPKLLFWGTPGVLIPPAEAARLAKSLPNCKAVDIGPGLNLLQEDNPDLIGSEIARWLSTLEISG

SEQ ID NO: 1918 - protein, 277 aa, Synthetic construct
MFHYVDVGPRDGTPVLFLHGNPTSSYVWRNIIPHVAPTHRCIAPDLIGMGKSDKPDLGYFFDDHVRFMDAFIEALGLEEVVLVIHDWGSALGFHWAKRNPERVKGIAFMEFIRPIPTWDEWPKFARETFQAFRTTDVGRKLIIDQNVFIEGTLPMGVVRPLTEVEMDHYREPFLNPVDREPLWRFPNELPIAGEPANIVALVEEYMDWLHQSPVPKLLFWGTPGVLIPPAEAARLAKSLPNCKAVDIGPGLNLLQEDNPDLIGSEIARWLSTLEISG

SEQ ID NO: 1919 - protein, 277 aa, Synthetic construct
MFHYVDVGPRDGTPVLFLHGNPTSSYVWRNIIPHVAPTHRCIAPDLIGMGKSDKPDLGYFFDDHVRFMDAFIEALGLEEVVLVIHDWGSALGFHWAKRNPERVKGIAFMEFIRPIPTWDEWPSFARETFQAFRTTDVGRKLIIDQNVFIEGTLPMGVVRPLTEVEMDHYREPFLNPVDREPLWRFPNELPIAGEPANIVALVEEYMDWLHQSPVPKLLFWGTPGVLIPPAEAARLAKSLPNCKAVDIGPGLNLLQEDNPDLIGSEIARWLSTLEISG

SEQ ID NO: 1920 - protein, 277 aa, Synthetic construct
MFHYVDVGPRDGTPVLFLHGNPTSSYVWRNIIPHVAPTHRCIAPDLIGMGKSDKPDLGYFFDDHVRFMDAFIEALGLEEVVLVIHDWGSALGFHWAKRNPERVKGIAFMEFIRPIPTWDEWPEAARETFQAFRTTDVGRKLIIDQNVFIEGTLPMGVVRPLTEVEMDHYREPFLNPVDREPLWRFPNELPIAGEPANIVALVEEYMDWLHQSPVPKLLFWGTPGVLIPPAEAARLAKSLPNCKAVDIGPGLNLLQEDNPDLIGSEIARWLSTLEISG

SEQ ID NO: 1921 - protein, 277 aa, Synthetic construct
MFHYVDVGPRDGTPVLFLHGNPTSSYVWRNIIPHVAPTHRCIAPDLIGMGKSDKPDLGYFFDDHVRFMDAFIEALGLEEVVLVIHDWGSALGFHWAKRNPERVKGIAFMEFIRPIPTWDEWPEPARETFQAFRTTDVGRKLIIDQNVFIEGTLPMGVVRPLTEVEMDHYREPFLNPVDREPLWRFPNELPIAGEPANIVALVEEYMDWLHQSPVPKLLFWGTPGVLIPPAEAARLAKSLPNCKAVDIGPGLNLLQEDNPDLIGSEIARWLSTLEISG

SEQ ID NO: 1922 - protein, 277 aa, Synthetic construct
MFHYVDVGPRDGTPVLFLHGNPTSSYVWRNIIPHVAPTHRCIAPDLIGMGKSDKPDLGYFFDDHVRFMDAFIEALGLEEVVLVIHDWGSALGFHWAKRNPERVKGIAFMEFIRPIPTWDEWPEGARETFQAFRTTDVGRKLIIDQNVFIEGTLPMGVVRPLTEVEMDHYREPFLNPVDREPLWRFPNELPIAGEPANIVALVEEYMDWLHQSPVPKLLFWGTPGVLIPPAEAARLAKSLPNCKAVDIGPGLNLLQEDNPDLIGSEIARWLSTLEISG

SEQ ID NO: 1923 - protein, 277 aa, Synthetic construct
MFHYVDVGPRDGTPVLFLHGNPTSSYVWRNIIPHVAPTHRCIAPDLIGMGKSDKPDLGYFFDDHVRFMDAFIEALGLEEVVLVIHDWGSALGFHWAKRNPERVKGIAFMEFIRPIPTWDEWPEKARETFQAFRTTDVGRKLIIDQNVFIEGTLPMGVVRPLTEVEMDHYREPFLNPVDREPLWRFPNELPIAGEPANIVALVEEYMDWLHQSPVPKLLFWGTPGVLIPPAEAARLAKSLPNCKAVDIGPGLNLLQEDNPDLIGSEIARWLSTLEISG

SEQ ID NO: 1924 - protein, 277 aa, Synthetic construct
MFHYVDVGPRDGTPVLFLHGNPTSSYVWRNIIPHVAPTHRCIAPDLIGMGKSDKPDLGYFFDDHVRFMDAFIEALGLEEVVLVIHDWGSALGFHWAKRNPERVKGIAFMEFIRPIPTWDEWPEEARETFQAFRTTDVGRKLIIDQNVFIEGTLPMGVVRPLTEVEMDHYREPFLNPVDREPLWRFPNELPIAGEPANIVALVEEYMDWLHQSPVPKLLFWGTPGVLIPPAEAARLAKSLPNCKAVDIGPGLNLLQEDNPDLIGSEIARWLSTLEISG

SEQ ID NO: 1925 - protein, 277 aa, Synthetic construct
MFHYVDVGPRDGTPVLFLHGNPTSSYVWRNIIPHVAPTHRCIAPDLIGMGKSDKPDLGYFFDDHVRFMDAFIEALGLEEVVLVIHDWGSALGFHWAKRNPERVKGIAFMEFIRPIPTWDEWPESARETFQAFRTTDVGRKLIIDQNVFIEGTLPMGVVRPLTEVEMDHYREPFLNPVDREPLWRFPNELPIAGEPANIVALVEEYMDWLHQSPVPKLLFWGTPGVLIPPAEAARLAKSLPNCKAVDIGPGLNLLQEDNPDLIGSEIARWLSTLEISG

SEQ ID NO: 1926 - protein, 277 aa, Synthetic construct
MFHYVDVGPRDGTPVLFLHGNPTSSYVWRNIIPHVAPTHRCIAPDLIGMGKSDKPDLGYFFDDHVRFMDAFIEALGLEEVVLVIHDWGSALGFHWAKRNPERVKGIAFMEFIRPIPTWDEWPEFGRETFQAFRTTDVGRKLIIDQNVFIEGTLPMGVVRPLTEVEMDHYREPFLNPVDREPLWRFPNELPIAGEPANIVALVEEYMDWLHQSPVPKLLFWGTPGVLIPPAEAARLAKSLPNCKAVDIGPGLNLLQEDNPDLIGSEIARWLSTLEISG

SEQ ID NO: 1927 - protein, 277 aa, Synthetic construct
MFHYVDVGPRDGTPVLFLHGNPTSSYVWRNIIPHVAPTHRCIAPDLIGMGKSDKPDLGYFFDDHVRFMDAFIEALGLEEVVLVIHDWGSALGFHWAKRNPERVKGIAFMEFIRPIPTWDEWPEFVRETFQAFRTTDVGRKLIIDQNVFIEGTLPMGVVRPLTEVEMDHYREPFLNPVDREPLWRFPNELPIAGEPANIVALVEEYMDWLHQSPVPKLLFWGTPGVLIPPAEAARLAKSLPNCKAVDIGPGLNLLQEDNPDLIGSEIARWLSTLEISG

SEQ ID NO: 1928 - protein, 277 aa, Synthetic construct
MFHYVDVGPRDGTPVLFLHGNPTSSYVWRNIIPHVAPTHRCIAPDLIGMGKSDKPDLGYFFDDHVRFMDAFIEALGLEEVVLVIHDWGSALGFHWAKRNPERVKGIAFMEFIRPIPTWDEWPEFTRETFQAFRTTDVGRKLIIDQNVFIEGTLPMGVVRPLTEVEMDHYREPFLNPVDREPLWRFPNELPIAGEPANIVALVEEYMDWLHQSPVPKLLFWGTPGVLIPPAEAARLAKSLPNCKAVDIGPGLNLLQEDNPDLIGSEIARWLSTLEISG

SEQ ID NO: 1929 - protein, 277 aa, Synthetic construct
MFHYVDVGPRDGTPVLFLHGNPTSSYVWRNIIPHVAPTHRCIAPDLIGMGKSDKPDLGYFFDDHVRFMDAFIEALGLEEVVLVIHDWGSALGFHWAKRNPERVKGIAFMEFIRPIPTWDEWPEFSRETFQAFRTTDVGRKLIIDQNVFIEGTLPMGVVRPLTEVEMDHYREPFLNPVDREPLWRFPNELPIAGEPANIVALVEEYMDWLHQSPVPKLLFWGTPGVLIPPAEAARLAKSLPNCKAVDIGPGLNLLQEDNPDLIGSEIARWLSTLEISG

SEQ ID NO: 1930 - protein, 277 aa, Synthetic construct
MFHYVDVGPRDGTPVLFLHGNPTSSYVWRNIIPHVAPTHRCIAPDLIGMGKSDKPDLGYFFDDHVRFMDAFIEALGLEEVVLVIHDWGSALGFHWAKRNPERVKGIAFMEFIRPIPTWDEWPEFMRETFQAFRTTDVGRKLIIDQNVFIEGTLPMGVVRPLTEVEMDHYREPFLNPVDREPLWRFPNELPIAGEPANIVALVEEYMDWLHQSPVPKLLFWGTPGVLIPPAEAARLAKSLPNCKAVDIGPGLNLLQEDNPDLIGSEIARWLSTLEISG

SEQ ID NO: 1931 - protein, 277 aa, Synthetic construct
MFHYVDVGPRDGTPVLFLHGNPTSSYVWRNIIPHVAPTHRCIAPDLIGMGKSDKPDLGYFFDDHVRFMDAFIEALGLEEVVLVIHDWGSALGFHWAKRNPERVKGIAFMEFIRPIPTWDEWPEFIRETFQAFRTTDVGRKLIIDQNVFIEGTLPMGVVRPLTEVEMDHYREPFLNPVDREPLWRFPNELPIAGEPANIVALVEEYMDWLHQSPVPKLLFWGTPGVLIPPAEAARLAKSLPNCKAVDIGPGLNLLQEDNPDLIGSEIARWLSTLEISG

SEQ ID NO: 1932 - protein, 277 aa, Synthetic construct
MFHYVDVGPRDGTPVLFLHGNPTSSYVWRNIIPHVAPTHRCIAPDLIGMGKSDKPDLGYFFDDHVRFMDAFIEALGLEEVVLVIHDWGSALGFHWAKRNPERVKGIAFMEFIRPIPTWDEWPEFAKETFQAFRTTDVGRKLIIDQNVFIEGTLPMGVVRPLTEVEMDHYREPFLNPVDREPLWRFPNELPIAGEPANIVALVEEYMDWLHQSPVPKLLFWGTPGVLIPPAEAARLAKSLPNCKAVDIGPGLNLLQEDNPDLIGSEIARWLSTLEISG

SEQ ID NO: 1933 - protein, 277 aa, Synthetic construct
MFHYVDVGPRDGTPVLFLHGNPTSSYVWRNIIPHVAPTHRCIAPDLIGMGKSDKPDLGYFFDDHVRFMDAFIEALGLEEVVLVIHDWGSALGFHWAKRNPERVKGIAFMEFIRPIPTWDEWPEFAQETFQAFRTTDVGRKLIIDQNVFIEGTLPMGVVRPLTEVEMDHYREPFLNPVDREPLWRFPNELPIAGEPANIVALVEEYMDWLHQSPVPKLLFWGTPGVLIPPAEAARLAKSLPNCKAVDIGPGLNLLQEDNPDLIGSEIARWLSTLEISG

SEQ ID NO: 1934 - protein, 277 aa, Synthetic construct
MFHYVDVGPRDGTPVLFLHGNPTSSYVWRNIIPHVAPTHRCIAPDLIGMGKSDKPDLGYFFDDHVRFMDAFIEALGLEEVVLVIHDWGSALGFHWAKRNPERVKGIAFMEFIRPIPTWDEWPEFAAETFQAFRTTDVGRKLIIDQNVFIEGTLPMGVVRPLTEVEMDHYREPFLNPVDREPLWRFPNELPIAGEPANIVALVEEYMDWLHQSPVPKLLFWGTPGVLIPPAEAARLAKSLPNCKAVDIGPGLNLLQEDNPDLIGSEIARWLSTLEISG

SEQ ID NO: 1935 - protein, 277 aa, Synthetic construct
MFHYVDVGPRDGTPVLFLHGNPTSSYVWRNIIPHVAPTHRCIAPDLIGMGKSDKPDLGYFFDDHVRFMDAFIEALGLEEVVLVIHDWGSALGFHWAKRNPERVKGIAFMEFIRPIPTWDEWPEFALETFQAFRTTDVGRKLIIDQNVFIEGTLPMGVVRPLTEVEMDHYREPFLNPVDREPLWRFPNELPIAGEPANIVALVEEYMDWLHQSPVPKLLFWGTPGVLIPPAEAARLAKSLPNCKAVDIGPGLNLLQEDNPDLIGSEIARWLSTLEISG

SEQ ID NO: 1936 - protein, 277 aa, Synthetic construct
MFHYVDVGPRDGTPVLFLHGNPTSSYVWRNIIPHVAPTHRCIAPDLIGMGKSDKPDLGYFFDDHVRFMDAFIEALGLEEVVLVIHDWGSALGFHWAKRNPERVKGIAFMEFIRPIPTWDEWPEFAVETFQAFRTTDVGRKLIIDQNVFIEGTLPMGVVRPLTEVEMDHYREPFLNPVDREPLWRFPNELPIAGEPANIVALVEEYMDWLHQSPVPKLLFWGTPGVLIPPAEAARLAKSLPNCKAVDIGPGLNLLQEDNPDLIGSEIARWLSTLEISG

SEQ ID NO: 1937 - protein, 277 aa, Synthetic construct
MFHYVDVGPRDGTPVLFLHGNPTSSYVWRNIIPHVAPTHRCIAPDLIGMGKSDKPDLGYFFDDHVRFMDAFIEALGLEEVVLVIHDWGSALGFHWAKRNPERVKGIAFMEFIRPIPTWDEWPEFAHETFQAFRTTDVGRKLIIDQNVFIEGTLPMGVVRPLTEVEMDHYREPFLNPVDREPLWRFPNELPIAGEPANIVALVEEYMDWLHQSPVPKLLFWGTPGVLIPPAEAARLAKSLPNCKAVDIGPGLNLLQEDNPDLIGSEIARWLSTLEISG

SEQ ID NO: 1938 - protein, 277 aa, Synthetic construct
MFHYVDVGPRDGTPVLFLHGNPTSSYVWRNIIPHVAPTHRCIAPDLIGMGKSDKPDLGYFFDDHVRFMDAFIEALGLEEVVLVIHDWGSALGFHWAKRNPERVKGIAFMEFIRPIPTWDEWPEFARKTFQAFRTTDVGRKLIIDQNVFIEGTLPMGVVRPLTEVEMDHYREPFLNPVDREPLWRFPNELPIAGEPANIVALVEEYMDWLHQSPVPKLLFWGTPGVLIPPAEAARLAKSLPNCKAVDIGPGLNLLQEDNPDLIGSEIARWLSTLEISG

SEQ ID NO: 1939 - protein, 277 aa, Synthetic construct
MFHYVDVGPRDGTPVLFLHGNPTSSYVWRNIIPHVAPTHRCIAPDLIGMGKSDKPDLGYFFDDHVRFMDAFIEALGLEEVVLVIHDWGSALGFHWAKRNPERVKGIAFMEFIRPIPTWDEWPEFARATFQAFRTTDVGRKLIIDQNVFIEGTLPMGVVRPLTEVEMDHYREPFLNPVDREPLWRFPNELPIAGEPANIVALVEEYMDWLHQSPVPKLLFWGTPGVLIPPAEAARLAKSLPNCKAVDIGPGLNLLQEDNPDLIGSEIARWLSTLEISG

SEQ ID NO: 1940 - protein, 277 aa, Synthetic construct
MFHYVDVGPRDGTPVLFLHGNPTSSYVWRNIIPHVAPTHRCIAPDLIGMGKSDKPDLGYFFDDHVRFMDAFIEALGLEEVVLVIHDWGSALGFHWAKRNPERVKGIAFMEFIRPIPTWDEWPEFARQTFQAFRTTDVGRKLIIDQNVFIEGTLPMGVVRPLTEVEMDHYREPFLNPVDREPLWRFPNELPIAGEPANIVALVEEYMDWLHQSPVPKLLFWGTPGVLIPPAEAARLAKSLPNCKAVDIGPGLNLLQEDNPDLIGSEIARWLSTLEISG

SEQ ID NO: 1941 - protein, 277 aa, Synthetic construct
MFHYVDVGPRDGTPVLFLHGNPTSSYVWRNIIPHVAPTHRCIAPDLIGMGKSDKPDLGYFFDDHVRFMDAFIEALGLEEVVLVIHDWGSALGFHWAKRNPERVKGIAFMEFIRPIPTWDEWPEFARRTFQAFRTTDVGRKLIIDQNVFIEGTLPMGVVRPLTEVEMDHYREPFLNPVDREPLWRFPNELPIAGEPANIVALVEEYMDWLHQSPVPKLLFWGTPGVLIPPAEAARLAKSLPNCKAVDIGPGLNLLQEDNPDLIGSEIARWLSTLEISG

SEQ ID NO: 1942 - protein, 277 aa, Synthetic construct
MFHYVDVGPRDGTPVLFLHGNPTSSYVWRNIIPHVAPTHRCIAPDLIGMGKSDKPDLGYFFDDHVRFMDAFIEALGLEEVVLVIHDWGSALGFHWAKRNPERVKGIAFMEFIRPIPTWDEWPEFARPTFQAFRTTDVGRKLIIDQNVFIEGTLPMGVVRPLTEVEMDHYREPFLNPVDREPLWRFPNELPIAGEPANIVALVEEYMDWLHQSPVPKLLFWGTPGVLIPPAEAARLAKSLPNCKAVDIGPGLNLLQEDNPDLIGSEIARWLSTLEISG

SEQ ID NO: 1943 - protein, 277 aa, Synthetic construct
MFHYVDVGPRDGTPVLFLHGNPTSSYVWRNIIPHVAPTHRCIAPDLIGMGKSDKPDLGYFFDDHVRFMDAFIEALGLEEVVLVIHDWGSALGFHWAKRNPERVKGIAFMEFIRPIPTWDEWPEFARSTFQAFRTTDVGRKLIIDQNVFIEGTLPMGVVRPLTEVEMDHYREPFLNPVDREPLWRFPNELPIAGEPANIVALVEEYMDWLHQSPVPKLLFWGTPGVLIPPAEAARLAKSLPNCKAVDIGPGLNLLQEDNPDLIGSEIARWLSTLEISG

SEQ ID NO: 1944 - protein, 277 aa, Synthetic construct
MFHYVDVGPRDGTPVLFLHGNPTSSYVWRNIIPHVAPTHRCIAPDLIGMGKSDKPDLGYFFDDHVRFMDAFIEALGLEEVVLVIHDWGSALGFHWAKRNPERVKGIAFMEFIRPIPTWDEWPEFARERFQAFRTTDVGRKLIIDQNVFIEGTLPMGVVRPLTEVEMDHYREPFLNPVDREPLWRFPNELPIAGEPANIVALVEEYMDWLHQSPVPKLLFWGTPGVLIPPAEAARLAKSLPNCKAVDIGPGLNLLQEDNPDLIGSEIARWLSTLEISG

SEQ ID NO: 1945 - protein, 277 aa, Synthetic construct
MFHYVDVGPRDGTPVLFLHGNPTSSYVWRNIIPHVAPTHRCIAPDLIGMGKSDKPDLGYFFDDHVRFMDAFIEALGLEEVVLVIHDWGSALGFHWAKRNPERVKGIAFMEFIRPIPTWDEWPEFARELFQAFRTTDVGRKLIIDQNVFIEGTLPMGVVRPLTEVEMDHYREPFLNPVDREPLWRFPNELPIAGEPANIVALVEEYMDWLHQSPVPKLLFWGTPGVLIPPAEAARLAKSLPNCKAVDIGPGLNLLQEDNPDLIGSEIARWLSTLEISG

SEQ ID NO: 1946 - protein, 277 aa, Synthetic construct
MFHYVDVGPRDGTPVLFLHGNPTSSYVWRNIIPHVAPTHRCIAPDLIGMGKSDKPDLGYFFDDHVRFMDAFIEALGLEEVVLVIHDWGSALGFHWAKRNPERVKGIAFMEFIRPIPTWDEWPEFAREAFQAFRTTDVGRKLIIDQNVFIEGTLPMGVVRPLTEVEMDHYREPFLNPVDREPLWRFPNELPIAGEPANIVALVEEYMDWLHQSPVPKLLFWGTPGVLIPPAEAARLAKSLPNCKAVDIGPGLNLLQEDNPDLIGSEIARWLSTLEISG

SEQ ID NO: 1947 - protein, 277 aa, Synthetic construct
MFHYVDVGPRDGTPVLFLHGNPTSSYVWRNIIPHVAPTHRCIAPDLIGMGKSDKPDLGYFFDDHVRFMDAFIEALGLEEVVLVIHDWGSALGFHWAKRNPERVKGIAFMEFIRPIPTWDEWPEFAREIFQAFRTTDVGRKLIIDQNVFIEGTLPMGVVRPLTEVEMDHYREPFLNPVDREPLWRFPNELPIAGEPANIVALVEEYMDWLHQSPVPKLLFWGTPGVLIPPAEAARLAKSLPNCKAVDIGPGLNLLQEDNPDLIGSEIARWLSTLEISG

SEQ ID NO: 1948 - protein, 277 aa, Synthetic construct
MFHYVDVGPRDGTPVLFLHGNPTSSYVWRNIIPHVAPTHRCIAPDLIGMGKSDKPDLGYFFDDHVRFMDAFIEALGLEEVVLVIHDWGSALGFHWAKRNPERVKGIAFMEFIRPIPTWDEWPEFAREVFQAFRTTDVGRKLIIDQNVFIEGTLPMGVVRPLTEVEMDHYREPFLNPVDREPLWRFPNELPIAGEPANIVALVEEYMDWLHQSPVPKLLFWGTPGVLIPPAEAARLAKSLPNCKAVDIGPGLNLLQEDNPDLIGSEIARWLSTLEISG

SEQ ID NO: 1949 - protein, 277 aa, Synthetic construct
MFHYVDVGPRDGTPVLFLHGNPTSSYVWRNIIPHVAPTHRCIAPDLIGMGKSDKPDLGYFFDDHVRFMDAFIEALGLEEVVLVIHDWGSALGFHWAKRNPERVKGIAFMEFIRPIPTWDEWPEFAREMFQAFRTTDVGRKLIIDQNVFIEGTLPMGVVRPLTEVEMDHYREPFLNPVDREPLWRFPNELPIAGEPANIVALVEEYMDWLHQSPVPKLLFWGTPGVLIPPAEAARLAKSLPNCKAVDIGPGLNLLQEDNPDLIGSEIARWLSTLEISG

SEQ ID NO: 1950 - protein, 277 aa, Synthetic construct
MFHYVDVGPRDGTPVLFLHGNPTSSYVWRNIIPHVAPTHRCIAPDLIGMGKSDKPDLGYFFDDHVRFMDAFIEALGLEEVVLVIHDWGSALGFHWAKRNPERVKGIAFMEFIRPIPTWDEWPEFARETLQAFRTTDVGRKLIIDQNVFIEGTLPMGVVRPLTEVEMDHYREPFLNPVDREPLWRFPNELPIAGEPANIVALVEEYMDWLHQSPVPKLLFWGTPGVLIPPAEAARLAKSLPNCKAVDIGPGLNLLQEDNPDLIGSEIARWLSTLEISG

SEQ ID NO: 1951 - protein, 277 aa, Synthetic construct
MFHYVDVGPRDGTPVLFLHGNPTSSYVWRNIIPHVAPTHRCIAPDLIGMGKSDKPDLGYFFDDHVRFMDAFIEALGLEEVVLVIHDWGSALGFHWAKRNPERVKGIAFMEFIRPIPTWDEWPEFARETYQAFRTTDVGRKLIIDQNVFIEGTLPMGVVRPLTEVEMDHYREPFLNPVDREPLWRFPNELPIAGEPANIVALVEEYMDWLHQSPVPKLLFWGTPGVLIPPAEAARLAKSLPNCKAVDIGPGLNLLQEDNPDLIGSEIARWLSTLEISG

SEQ ID NO: 1952 - protein, 277 aa, Synthetic construct
MFHYVDVGPRDGTPVLFLHGNPTSSYVWRNIIPHVAPTHRCIAPDLIGMGKSDKPDLGYFFDDHVRFMDAFIEALGLEEVVLVIHDWGSALGFHWAKRNPERVKGIAFMEFIRPIPTWDEWPEFARETIQAFRTTDVGRKLIIDQNVFIEGTLPMGVVRPLTEVEMDHYREPFLNPVDREPLWRFPNELPIAGEPANIVALVEEYMDWLHQSPVPKLLFWGTPGVLIPPAEAARLAKSLPNCKAVDIGPGLNLLQEDNPDLIGSEIARWLSTLEISG

SEQ ID NO: 1953 - protein, 277 aa, Synthetic construct
MFHYVDVGPRDGTPVLFLHGNPTSSYVWRNIIPHVAPTHRCIAPDLIGMGKSDKPDLGYFFDDHVRFMDAFIEALGLEEVVLVIHDWGSALGFHWAKRNPERVKGIAFMEFIRPIPTWDEWPEFARETMQAFRTTDVGRKLIIDQNVFIEGTLPMGVVRPLTEVEMDHYREPFLNPVDREPLWRFPNELPIAGEPANIVALVEEYMDWLHQSPVPKLLFWGTPGVLIPPAEAARLAKSLPNCKAVDIGPGLNLLQEDNPDLIGSEIARWLSTLEISG

SEQ ID NO: 1954 - protein, 277 aa, Synthetic construct
MFHYVDVGPRDGTPVLFLHGNPTSSYVWRNIIPHVAPTHRCIAPDLIGMGKSDKPDLGYFFDDHVRFMDAFIEALGLEEVVLVIHDWGSALGFHWAKRNPERVKGIAFMEFIRPIPTWDEWPEFARETVQAFRTTDVGRKLIIDQNVFIEGTLPMGVVRPLTEVEMDHYREPFLNPVDREPLWRFPNELPIAGEPANIVALVEEYMDWLHQSPVPKLLFWGTPGVLIPPAEAARLAKSLPNCKAVDIGPGLNLLQEDNPDLIGSEIARWLSTLEISG

SEQ ID NO: 1955 - protein, 277 aa, Synthetic construct
MFHYVDVGPRDGTPVLFLHGNPTSSYVWRNIIPHVAPTHRCIAPDLIGMGKSDKPDLGYFFDDHVRFMDAFIEALGLEEVVLVIHDWGSALGFHWAKRNPERVKGIAFMEFIRPIPTWDEWPEFARETWQAFRTTDVGRKLIIDQNVFIEGTLPMGVVRPLTEVEMDHYREPFLNPVDREPLWRFPNELPIAGEPANIVALVEEYMDWLHQSPVPKLLFWGTPGVLIPPAEAARLAKSLPNCKAVDIGPGLNLLQEDNPDLIGSEIARWLSTLEISG

SEQ ID NO: 1956 - protein, 277 aa, Synthetic construct
MFHYVDVGPRDGTPVLFLHGNPTSSYVWRNIIPHVAPTHRCIAPDLIGMGKSDKPDLGYFFDDHVRFMDAFIEALGLEEVVLVIHDWGSALGFHWAKRNPERVKGIAFMEFIRPIPTWDEWPEFARETFRAFRTTDVGRKLIIDQNVFIEGTLPMGVVRPLTEVEMDHYREPFLNPVDREPLWRFPNELPIAGEPANIVALVEEYMDWLHQSPVPKLLFWGTPGVLIPPAEAARLAKSLPNCKAVDIGPGLNLLQEDNPDLIGSEIARWLSTLEISG

SEQ ID NO: 1957 - protein, 277 aa, Synthetic construct
MFHYVDVGPRDGTPVLFLHGNPTSSYVWRNIIPHVAPTHRCIAPDLIGMGKSDKPDLGYFFDDHVRFMDAFIEALGLEEVVLVIHDWGSALGFHWAKRNPERVKGIAFMEFIRPIPTWDEWPEFARETFKAFRTTDVGRKLIIDQNVFIEGTLPMGVVRPLTEVEMDHYREPFLNPVDREPLWRFPNELPIAGEPANIVALVEEYMDWLHQSPVPKLLFWGTPGVLIPPAEAARLAKSLPNCKAVDIGPGLNLLQEDNPDLIGSEIARWLSTLEISG

SEQ ID NO: 1958 - protein, 277 aa, Synthetic construct
MFHYVDVGPRDGTPVLFLHGNPTSSYVWRNIIPHVAPTHRCIAPDLIGMGKSDKPDLGYFFDDHVRFMDAFIEALGLEEVVLVIHDWGSALGFHWAKRNPERVKGIAFMEFIRPIPTWDEWPEFARETFAAFRTTDVGRKLIIDQNVFIEGTLPMGVVRPLTEVEMDHYREPFLNPVDREPLWRFPNELPIAGEPANIVALVEEYMDWLHQSPVPKLLFWGTPGVLIPPAEAARLAKSLPNCKAVDIGPGLNLLQEDNPDLIGSEIARWLSTLEISG

SEQ ID NO: 1959 - protein, 277 aa, Synthetic construct
MFHYVDVGPRDGTPVLFLHGNPTSSYVWRNIIPHVAPTHRCIAPDLIGMGKSDKPDLGYFFDDHVRFMDAFIEALGLEEVVLVIHDWGSALGFHWAKRNPERVKGIAFMEFIRPIPTWDEWPEFARETFEAFRTTDVGRKLIIDQNVFIEGTLPMGVVRPLTEVEMDHYREPFLNPVDREPLWRFPNELPIAGEPANIVALVEEYMDWLHQSPVPKLLFWGTPGVLIPPAEAARLAKSLPNCKAVDIGPGLNLLQEDNPDLIGSEIARWLSTLEISG

SEQ ID NO: 1960 - protein, 277 aa, Synthetic construct
MFHYVDVGPRDGTPVLFLHGNPTSSYVWRNIIPHVAPTHRCIAPDLIGMGKSDKPDLGYFFDDHVRFMDAFIEALGLEEVVLVIHDWGSALGFHWAKRNPERVKGIAFMEFIRPIPTWDEWPEFARETFLAFRTTDVGRKLIIDQNVFIEGTLPMGVVRPLTEVEMDHYREPFLNPVDREPLWRFPNELPIAGEPANIVALVEEYMDWLHQSPVPKLLFWGTPGVLIPPAEAARLAKSLPNCKAVDIGPGLNLLQEDNPDLIGSEIARWLSTLEISG

SEQ ID NO: 1961 - protein, 277 aa, Synthetic construct
MFHYVDVGPRDGTPVLFLHGNPTSSYVWRNIIPHVAPTHRCIAPDLIGMGKSDKPDLGYFFDDHVRFMDAFIEALGLEEVVLVIHDWGSALGFHWAKRNPERVKGIAFMEFIRPIPTWDEWPEFARETFTAFRTTDVGRKLIIDQNVFIEGTLPMGVVRPLTEVEMDHYREPFLNPVDREPLWRFPNELPIAGEPANIVALVEEYMDWLHQSPVPKLLFWGTPGVLIPPAEAARLAKSLPNCKAVDIGPGLNLLQEDNPDLIGSEIARWLSTLEISG

SEQ ID NO: 1962 - protein, 277 aa, Synthetic construct
MFHYVDVGPRDGTPVLFLHGNPTSSYVWRNIIPHVAPTHRCIAPDLIGMGKSDKPDLGYFFDDHVRFMDAFIEALGLEEVVLVIHDWGSALGFHWAKRNPERVKGIAFMEFIRPIPTWDEWPEFARETFQRFRTTDVGRKLIIDQNVFIEGTLPMGVVRPLTEVEMDHYREPFLNPVDREPLWRFPNELPIAGEPANIVALVEEYMDWLHQSPVPKLLFWGTPGVLIPPAEAARLAKSLPNCKAVDIGPGLNLLQEDNPDLIGSEIARWLSTLEISG

SEQ ID NO: 1963 - protein, 277 aa, Synthetic construct
MFHYVDVGPRDGTPVLFLHGNPTSSYVWRNIIPHVAPTHRCIAPDLIGMGKSDKPDLGYFFDDHVRFMDAFIEALGLEEVVLVIHDWGSALGFHWAKRNPERVKGIAFMEFIRPIPTWDEWPEFARETFQGFRTTDVGRKLIIDQNVFIEGTLPMGVVRPLTEVEMDHYREPFLNPVDREPLWRFPNELPIAGEPANIVALVEEYMDWLHQSPVPKLLFWGTPGVLIPPAEAARLAKSLPNCKAVDIGPGLNLLQEDNPDLIGSEIARWLSTLEISG

SEQ ID NO: 1964 - protein, 277 aa, Synthetic construct
MFHYVDVGPRDGTPVLFLHGNPTSSYVWRNIIPHVAPTHRCIAPDLIGMGKSDKPDLGYFFDDHVRFMDAFIEALGLEEVVLVIHDWGSALGFHWAKRNPERVKGIAFMEFIRPIPTWDEWPEFARETFQSFRTTDVGRKLIIDQNVFIEGTLPMGVVRPLTEVEMDHYREPFLNPVDREPLWRFPNELPIAGEPANIVALVEEYMDWLHQSPVPKLLFWGTPGVLIPPAEAARLAKSLPNCKAVDIGPGLNLLQEDNPDLIGSEIARWLSTLEISG

SEQ ID NO: 1965 - protein, 277 aa, Synthetic construct
MFHYVDVGPRDGTPVLFLHGNPTSSYVWRNIIPHVAPTHRCIAPDLIGMGKSDKPDLGYFFDDHVRFMDAFIEALGLEEVVLVIHDWGSALGFHWAKRNPERVKGIAFMEFIRPIPTWDEWPEFARETFQKFRTTDVGRKLIIDQNVFIEGTLPMGVVRPLTEVEMDHYREPFLNPVDREPLWRFPNELPIAGEPANIVALVEEYMDWLHQSPVPKLLFWGTPGVLIPPAEAARLAKSLPNCKAVDIGPGLNLLQEDNPDLIGSEIARWLSTLEISG

SEQ ID NO: 1966 - protein, 277 aa, Synthetic construct
MFHYVDVGPRDGTPVLFLHGNPTSSYVWRNIIPHVAPTHRCIAPDLIGMGKSDKPDLGYFFDDHVRFMDAFIEALGLEEVVLVIHDWGSALGFHWAKRNPERVKGIAFMEFIRPIPTWDEWPEFARETFQQFRTTDVGRKLIIDQNVFIEGTLPMGVVRPLTEVEMDHYREPFLNPVDREPLWRFPNELPIAGEPANIVALVEEYMDWLHQSPVPKLLFWGTPGVLIPPAEAARLAKSLPNCKAVDIGPGLNLLQEDNPDLIGSEIARWLSTLEISG

SEQ ID NO: 1967 - protein, 277 aa, Synthetic construct
MFHYVDVGPRDGTPVLFLHGNPTSSYVWRNIIPHVAPTHRCIAPDLIGMGKSDKPDLGYFFDDHVRFMDAFIEALGLEEVVLVIHDWGSALGFHWAKRNPERVKGIAFMEFIRPIPTWDEWPEFARETFQTFRTTDVGRKLIIDQNVFIEGTLPMGVVRPLTEVEMDHYREPFLNPVDREPLWRFPNELPIAGEPANIVALVEEYMDWLHQSPVPKLLFWGTPGVLIPPAEAARLAKSLPNCKAVDIGPGLNLLQEDNPDLIGSEIARWLSTLEISG

SEQ ID NO: 1968 - protein, 277 aa, Synthetic construct
MFHYVDVGPRDGTPVLFLHGNPTSSYVWRNIIPHVAPTHRCIAPDLIGMGKSDKPDLGYFFDDHVRFMDAFIEALGLEEVVLVIHDWGSALGFHWAKRNPERVKGIAFMEFIRPIPTWDEWPEFARETFQALRTTDVGRKLIIDQNVFIEGTLPMGVVRPLTEVEMDHYREPFLNPVDREPLWRFPNELPIAGEPANIVALVEEYMDWLHQSPVPKLLFWGTPGVLIPPAEAARLAKSLPNCKAVDIGPGLNLLQEDNPDLIGSEIARWLSTLEISG

SEQ ID NO: 1969 - protein, 277 aa, Synthetic construct
MFHYVDVGPRDGTPVLFLHGNPTSSYVWRNIIPHVAPTHRCIAPDLIGMGKSDKPDLGYFFDDHVRFMDAFIEALGLEEVVLVIHDWGSALGFHWAKRNPERVKGIAFMEFIRPIPTWDEWPEFARETFQAMRTTDVGRKLIIDQNVFIEGTLPMGVVRPLTEVEMDHYREPFLNPVDREPLWRFPNELPIAGEPANIVALVEEYMDWLHQSPVPKLLFWGTPGVLIPPAEAARLAKSLPNCKAVDIGPGLNLLQEDNPDLIGSEIARWLSTLEISG

SEQ ID NO: 1970 - protein, 277 aa, Synthetic construct
MFHYVDVGPRDGTPVLFLHGNPTSSYVWRNIIPHVAPTHRCIAPDLIGMGKSDKPDLGYFFDDHVRFMDAFIEALGLEEVVLVIHDWGSALGFHWAKRNPERVKGIAFMEFIRPIPTWDEWPEFARETFQAIRTTDVGRKLIIDQNVFIEGTLPMGVVRPLTEVEMDHYREPFLNPVDREPLWRFPNELPIAGEPANIVALVEEYMDWLHQSPVPKLLFWGTPGVLIPPAEAARLAKSLPNCKAVDIGPGLNLLQEDNPDLIGSEIARWLSTLEISG

SEQ ID NO: 1971 - protein, 277 aa, Synthetic construct
MFHYVDVGPRDGTPVLFLHGNPTSSYVWRNIIPHVAPTHRCIAPDLIGMGKSDKPDLGYFFDDHVRFMDAFIEALGLEEVVLVIHDWGSALGFHWAKRNPERVKGIAFMEFIRPIPTWDEWPEFARETFQAYRTTDVGRKLIIDQNVFIEGTLPMGVVRPLTEVEMDHYREPFLNPVDREPLWRFPNELPIAGEPANIVALVEEYMDWLHQSPVPKLLFWGTPGVLIPPAEAARLAKSLPNCKAVDIGPGLNLLQEDNPDLIGSEIARWLSTLEISG

SEQ ID NO: 1972 - protein, 277 aa, Synthetic construct
MFHYVDVGPRDGTPVLFLHGNPTSSYVWRNIIPHVAPTHRCIAPDLIGMGKSDKPDLGYFFDDHVRFMDAFIEALGLEEVVLVIHDWGSALGFHWAKRNPERVKGIAFMEFIRPIPTWDEWPEFARETFQAVRTTDVGRKLIIDQNVFIEGTLPMGVVRPLTEVEMDHYREPFLNPVDREPLWRFPNELPIAGEPANIVALVEEYMDWLHQSPVPKLLFWGTPGVLIPPAEAARLAKSLPNCKAVDIGPGLNLLQEDNPDLIGSEIARWLSTLEISG

SEQ ID NO: 1973 - protein, 277 aa, Synthetic construct
MFHYVDVGPRDGTPVLFLHGNPTSSYVWRNIIPHVAPTHRCIAPDLIGMGKSDKPDLGYFFDDHVRFMDAFIEALGLEEVVLVIHDWGSALGFHWAKRNPERVKGIAFMEFIRPIPTWDEWPEFARETFQAARTTDVGRKLIIDQNVFIEGTLPMGVVRPLTEVEMDHYREPFLNPVDREPLWRFPNELPIAGEPANIVALVEEYMDWLHQSPVPKLLFWGTPGVLIPPAEAARLAKSLPNCKAVDIGPGLNLLQEDNPDLIGSEIARWLSTLEISG

SEQ ID NO: 1974 - protein, 277 aa, Synthetic construct
MFHYVDVGPRDGTPVLFLHGNPTSSYVWRNIIPHVAPTHRCIAPDLIGMGKSDKPDLGYFFDDHVRFMDAFIEALGLEEVVLVIHDWGSALGFHWAKRNPERVKGIAFMEFIRPIPTWDEWPEFARETFQAFKTTDVGRKLIIDQNVFIEGTLPMGVVRPLTEVEMDHYREPFLNPVDREPLWRFPNELPIAGEPANIVALVEEYMDWLHQSPVPKLLFWGTPGVLIPPAEAARLAKSLPNCKAVDIGPGLNLLQEDNPDLIGSEIARWLSTLEISG

SEQ ID NO: 1975 - protein, 277 aa, Synthetic construct
MFHYVDVGPRDGTPVLFLHGNPTSSYVWRNIIPHVAPTHRCIAPDLIGMGKSDKPDLGYFFDDHVRFMDAFIEALGLEEVVLVIHDWGSALGFHWAKRNPERVKGIAFMEFIRPIPTWDEWPEFARETFQAFQTTDVGRKLIIDQNVFIEGTLPMGVVRPLTEVEMDHYREPFLNPVDREPLWRFPNELPIAGEPANIVALVEEYMDWLHQSPVPKLLFWGTPGVLIPPAEAARLAKSLPNCKAVDIGPGLNLLQEDNPDLIGSEIARWLSTLEISG

SEQ ID NO: 1976 - protein, 277 aa, Synthetic construct
MFHYVDVGPRDGTPVLFLHGNPTSSYVWRNIIPHVAPTHRCIAPDLIGMGKSDKPDLGYFFDDHVRFMDAFIEALGLEEVVLVIHDWGSALGFHWAKRNPERVKGIAFMEFIRPIPTWDEWPEFARETFQAFLTTDVGRKLIIDQNVFIEGTLPMGVVRPLTEVEMDHYREPFLNPVDREPLWRFPNELPIAGEPANIVALVEEYMDWLHQSPVPKLLFWGTPGVLIPPAEAARLAKSLPNCKAVDIGPGLNLLQEDNPDLIGSEIARWLSTLEISG

SEQ ID NO: 1977 - protein, 277 aa, Synthetic construct
MFHYVDVGPRDGTPVLFLHGNPTSSYVWRNIIPHVAPTHRCIAPDLIGMGKSDKPDLGYFFDDHVRFMDAFIEALGLEEVVLVIHDWGSALGFHWAKRNPERVKGIAFMEFIRPIPTWDEWPEFARETFQAFATTDVGRKLIIDQNVFIEGTLPMGVVRPLTEVEMDHYREPFLNPVDREPLWRFPNELPIAGEPANIVALVEEYMDWLHQSPVPKLLFWGTPGVLIPPAEAARLAKSLPNCKAVDIGPGLNLLQEDNPDLIGSEIARWLSTLEISG

SEQ ID NO: 1978 - protein, 277 aa, Synthetic construct
MFHYVDVGPRDGTPVLFLHGNPTSSYVWRNIIPHVAPTHRCIAPDLIGMGKSDKPDLGYFFDDHVRFMDAFIEALGLEEVVLVIHDWGSALGFHWAKRNPERVKGIAFMEFIRPIPTWDEWPEFARETFQAFSTTDVGRKLIIDQNVFIEGTLPMGVVRPLTEVEMDHYREPFLNPVDREPLWRFPNELPIAGEPANIVALVEEYMDWLHQSPVPKLLFWGTPGVLIPPAEAARLAKSLPNCKAVDIGPGLNLLQEDNPDLIGSEIARWLSTLEISG

SEQ ID NO: 1979 - protein, 277 aa, Synthetic construct
MFHYVDVGPRDGTPVLFLHGNPTSSYVWRNIIPHVAPTHRCIAPDLIGMGKSDKPDLGYFFDDHVRFMDAFIEALGLEEVVLVIHDWGSALGFHWAKRNPERVKGIAFMEFIRPIPTWDEWPEFARETFQAFHTTDVGRKLIIDQNVFIEGTLPMGVVRPLTEVEMDHYREPFLNPVDREPLWRFPNELPIAGEPANIVALVEEYMDWLHQSPVPKLLFWGTPGVLIPPAEAARLAKSLPNCKAVDIGPGLNLLQEDNPDLIGSEIARWLSTLEISG

SEQ ID NO: 1980 - protein, 277 aa, Synthetic construct
MFHYVDVGPRDGTPVLFLHGNPTSSYVWRNIIPHVAPTHRCIAPDLIGMGKSDKPDLGYFFDDHVRFMDAFIEALGLEEVVLVIHDWGSALGFHWAKRNPERVKGIAFMEFIRPIPTWDEWPEFARETFQAFRSTDVGRKLIIDQNVFIEGTLPMGVVRPLTEVEMDHYREPFLNPVDREPLWRFPNELPIAGEPANIVALVEEYMDWLHQSPVPKLLFWGTPGVLIPPAEAARLAKSLPNCKAVDIGPGLNLLQEDNPDLIGSEIARWLSTLEISG

SEQ ID NO: 1981 - protein, 277 aa, Synthetic construct
MFHYVDVGPRDGTPVLFLHGNPTSSYVWRNIIPHVAPTHRCIAPDLIGMGKSDKPDLGYFFDDHVRFMDAFIEALGLEEVVLVIHDWGSALGFHWAKRNPERVKGIAFMEFIRPIPTWDEWPEFARETFQAFRDTDVGRKLIIDQNVFIEGTLPMGVVRPLTEVEMDHYREPFLNPVDREPLWRFPNELPIAGEPANIVALVEEYMDWLHQSPVPKLLFWGTPGVLIPPAEAARLAKSLPNCKAVDIGPGLNLLQEDNPDLIGSEIARWLSTLEISG

SEQ ID NO: 1982 - protein, 277 aa, Synthetic construct
MFHYVDVGPRDGTPVLFLHGNPTSSYVWRNIIPHVAPTHRCIAPDLIGMGKSDKPDLGYFFDDHVRFMDAFIEALGLEEVVLVIHDWGSALGFHWAKRNPERVKGIAFMEFIRPIPTWDEWPEFARETFQAFRETDVGRKLIIDQNVFIEGTLPMGVVRPLTEVEMDHYREPFLNPVDREPLWRFPNELPIAGEPANIVALVEEYMDWLHQSPVPKLLFWGTPGVLIPPAEAARLAKSLPNCKAVDIGPGLNLLQEDNPDLIGSEIARWLSTLEISG

SEQ ID NO: 1983 - protein, 277 aa, Synthetic construct
MFHYVDVGPRDGTPVLFLHGNPTSSYVWRNIIPHVAPTHRCIAPDLIGMGKSDKPDLGYFFDDHVRFMDAFIEALGLEEVVLVIHDWGSALGFHWAKRNPERVKGIAFMEFIRPIPTWDEWPEFARETFQAFRGTDVGRKLIIDQNVFIEGTLPMGVVRPLTEVEMDHYREPFLNPVDREPLWRFPNELPIAGEPANIVALVEEYMDWLHQSPVPKLLFWGTPGVLIPPAEAARLAKSLPNCKAVDIGPGLNLLQEDNPDLIGSEIARWLSTLEISG

SEQ ID NO: 1984 - protein, 277 aa, Synthetic construct
MFHYVDVGPRDGTPVLFLHGNPTSSYVWRNIIPHVAPTHRCIAPDLIGMGKSDKPDLGYFFDDHVRFMDAFIEALGLEEVVLVIHDWGSALGFHWAKRNPERVKGIAFMEFIRPIPTWDEWPEFARETFQAFRATDVGRKLIIDQNVFIEGTLPMGVVRPLTEVEMDHYREPFLNPVDREPLWRFPNELPIAGEPANIVALVEEYMDWLHQSPVPKLLFWGTPGVLIPPAEAARLAKSLPNCKAVDIGPGLNLLQEDNPDLIGSEIARWLSTLEISG

SEQ ID NO: 1985 - protein, 277 aa, Synthetic construct
MFHYVDVGPRDGTPVLFLHGNPTSSYVWRNIIPHVAPTHRCIAPDLIGMGKSDKPDLGYFFDDHVRFMDAFIEALGLEEVVLVIHDWGSALGFHWAKRNPERVKGIAFMEFIRPIPTWDEWPEFARETFQAFRNTDVGRKLIIDQNVFIEGTLPMGVVRPLTEVEMDHYREPFLNPVDREPLWRFPNELPIAGEPANIVALVEEYMDWLHQSPVPKLLFWGTPGVLIPPAEAARLAKSLPNCKAVDIGPGLNLLQEDNPDLIGSEIARWLSTLEISG

SEQ ID NO: 1986 - protein, 277 aa, Synthetic construct
MFHYVDVGPRDGTPVLFLHGNPTSSYVWRNIIPHVAPTHRCIAPDLIGMGKSDKPDLGYFFDDHVRFMDAFIEALGLEEVVLVIHDWGSALGFHWAKRNPERVKGIAFMEFIRPIPTWDEWPEFARETFQAFRTPDVGRKLIIDQNVFIEGTLPMGVVRPLTEVEMDHYREPFLNPVDREPLWRFPNELPIAGEPANIVALVEEYMDWLHQSPVPKLLFWGTPGVLIPPAEAARLAKSLPNCKAVDIGPGLNLLQEDNPDLIGSEIARWLSTLEISG

SEQ ID NO: 1987 - protein, 277 aa, Synthetic construct
MFHYVDVGPRDGTPVLFLHGNPTSSYVWRNIIPHVAPTHRCIAPDLIGMGKSDKPDLGYFFDDHVRFMDAFIEALGLEEVVLVIHDWGSALGFHWAKRNPERVKGIAFMEFIRPIPTWDEWPEFARETFQAFRTEDVGRKLIIDQNVFIEGTLPMGVVRPLTEVEMDHYREPFLNPVDREPLWRFPNELPIAGEPANIVALVEEYMDWLHQSPVPKLLFWGTPGVLIPPAEAARLAKSLPNCKAVDIGPGLNLLQEDNPDLIGSEIARWLSTLEISG

SEQ ID NO: 1988 - protein, 277 aa, Synthetic construct
MFHYVDVGPRDGTPVLFLHGNPTSSYVWRNIIPHVAPTHRCIAPDLIGMGKSDKPDLGYFFDDHVRFMDAFIEALGLEEVVLVIHDWGSALGFHWAKRNPERVKGIAFMEFIRPIPTWDEWPEFARETFQAFRTADVGRKLIIDQNVFIEGTLPMGVVRPLTEVEMDHYREPFLNPVDREPLWRFPNELPIAGEPANIVALVEEYMDWLHQSPVPKLLFWGTPGVLIPPAEAARLAKSLPNCKAVDIGPGLNLLQEDNPDLIGSEIARWLSTLEISG

SEQ ID NO: 1989 - protein, 277 aa, Synthetic construct
MFHYVDVGPRDGTPVLFLHGNPTSSYVWRNIIPHVAPTHRCIAPDLIGMGKSDKPDLGYFFDDHVRFMDAFIEALGLEEVVLVIHDWGSALGFHWAKRNPERVKGIAFMEFIRPIPTWDEWPEFARETFQAFRTSDVGRKLIIDQNVFIEGTLPMGVVRPLTEVEMDHYREPFLNPVDREPLWRFPNELPIAGEPANIVALVEEYMDWLHQSPVPKLLFWGTPGVLIPPAEAARLAKSLPNCKAVDIGPGLNLLQEDNPDLIGSEIARWLSTLEISG

SEQ ID NO: 1990 - protein, 277 aa, Synthetic construct
MFHYVDVGPRDGTPVLFLHGNPTSSYVWRNIIPHVAPTHRCIAPDLIGMGKSDKPDLGYFFDDHVRFMDAFIEALGLEEVVLVIHDWGSALGFHWAKRNPERVKGIAFMEFIRPIPTWDEWPEFARETFQAFRTDDVGRKLIIDQNVFIEGTLPMGVVRPLTEVEMDHYREPFLNPVDREPLWRFPNELPIAGEPANIVALVEEYMDWLHQSPVPKLLFWGTPGVLIPPAEAARLAKSLPNCKAVDIGPGLNLLQEDNPDLIGSEIARWLSTLEISG

SEQ ID NO: 1991 - protein, 277 aa, Synthetic construct
MFHYVDVGPRDGTPVLFLHGNPTSSYVWRNIIPHVAPTHRCIAPDLIGMGKSDKPDLGYFFDDHVRFMDAFIEALGLEEVVLVIHDWGSALGFHWAKRNPERVKGIAFMEFIRPIPTWDEWPEFARETFQAFRTGDVGRKLIIDQNVFIEGTLPMGVVRPLTEVEMDHYREPFLNPVDREPLWRFPNELPIAGEPANIVALVEEYMDWLHQSPVPKLLFWGTPGVLIPPAEAARLAKSLPNCKAVDIGPGLNLLQEDNPDLIGSEIARWLSTLEISG

SEQ ID NO: 1992 - protein, 277 aa, Synthetic construct
MFHYVDVGPRDGTPVLFLHGNPTSSYVWRNIIPHVAPTHRCIAPDLIGMGKSDKPDLGYFFDDHVRFMDAFIEALGLEEVVLVIHDWGSALGFHWAKRNPERVKGIAFMEFIRPIPTWDEWPEFARETFQAFRTTEVGRKLIIDQNVFIEGTLPMGVVRPLTEVEMDHYREPFLNPVDREPLWRFPNELPIAGEPANIVALVEEYMDWLHQSPVPKLLFWGTPGVLIPPAEAARLAKSLPNCKAVDIGPGLNLLQEDNPDLIGSEIARWLSTLEISG

SEQ ID NO: 1993 - protein, 277 aa, Synthetic construct
MFHYVDVGPRDGTPVLFLHGNPTSSYVWRNIIPHVAPTHRCIAPDLIGMGKSDKPDLGYFFDDHVRFMDAFIEALGLEEVVLVIHDWGSALGFHWAKRNPERVKGIAFMEFIRPIPTWDEWPEFARETFQAFRTTGVGRKLIIDQNVFIEGTLPMGVVRPLTEVEMDHYREPFLNPVDREPLWRFPNELPIAGEPANIVALVEEYMDWLHQSPVPKLLFWGTPGVLIPPAEAARLAKSLPNCKAVDIGPGLNLLQEDNPDLIGSEIARWLSTLEISG

SEQ ID NO: 1994 - protein, 277 aa, Synthetic construct
MFHYVDVGPRDGTPVLFLHGNPTSSYVWRNIIPHVAPTHRCIAPDLIGMGKSDKPDLGYFFDDHVRFMDAFIEALGLEEVVLVIHDWGSALGFHWAKRNPERVKGIAFMEFIRPIPTWDEWPEFARETFQAFRTTPVGRKLIIDQNVFIEGTLPMGVVRPLTEVEMDHYREPFLNPVDREPLWRFPNELPIAGEPANIVALVEEYMDWLHQSPVPKLLFWGTPGVLIPPAEAARLAKSLPNCKAVDIGPGLNLLQEDNPDLIGSEIARWLSTLEISG

SEQ ID NO: 1995 - protein, 277 aa, Synthetic construct
MFHYVDVGPRDGTPVLFLHGNPTSSYVWRNIIPHVAPTHRCIAPDLIGMGKSDKPDLGYFFDDHVRFMDAFIEALGLEEVVLVIHDWGSALGFHWAKRNPERVKGIAFMEFIRPIPTWDEWPEFARETFQAFRTTAVGRKLIIDQNVFIEGTLPMGVVRPLTEVEMDHYREPFLNPVDREPLWRFPNELPIAGEPANIVALVEEYMDWLHQSPVPKLLFWGTPGVLIPPAEAARLAKSLPNCKAVDIGPGLNLLQEDNPDLIGSEIARWLSTLEISG

SEQ ID NO: 1996 - protein, 277 aa, Synthetic construct
MFHYVDVGPRDGTPVLFLHGNPTSSYVWRNIIPHVAPTHRCIAPDLIGMGKSDKPDLGYFFDDHVRFMDAFIEALGLEEVVLVIHDWGSALGFHWAKRNPERVKGIAFMEFIRPIPTWDEWPEFARETFQAFRTTSVGRKLIIDQNVFIEGTLPMGVVRPLTEVEMDHYREPFLNPVDREPLWRFPNELPIAGEPANIVALVEEYMDWLHQSPVPKLLFWGTPGVLIPPAEAARLAKSLPNCKAVDIGPGLNLLQEDNPDLIGSEIARWLSTLEISG

SEQ ID NO: 1997 - protein, 277 aa, Synthetic construct
MFHYVDVGPRDGTPVLFLHGNPTSSYVWRNIIPHVAPTHRCIAPDLIGMGKSDKPDLGYFFDDHVRFMDAFIEALGLEEVVLVIHDWGSALGFHWAKRNPERVKGIAFMEFIRPIPTWDEWPEFARETFQAFRTTKVGRKLIIDQNVFIEGTLPMGVVRPLTEVEMDHYREPFLNPVDREPLWRFPNELPIAGEPANIVALVEEYMDWLHQSPVPKLLFWGTPGVLIPPAEAARLAKSLPNCKAVDIGPGLNLLQEDNPDLIGSEIARWLSTLEISG

SEQ ID NO: 1998 - protein, 277 aa, Synthetic construct
MFHYVDVGPRDGTPVLFLHGNPTSSYVWRNIIPHVAPTHRCIAPDLIGMGKSDKPDLGYFFDDHVRFMDAFIEALGLEEVVLVIHDWGSALGFHWAKRNPERVKGIAFMEFIRPIPTWDEWPEFARETFQAFRTTDAGRKLIIDQNVFIEGTLPMGVVRPLTEVEMDHYREPFLNPVDREPLWRFPNELPIAGEPANIVALVEEYMDWLHQSPVPKLLFWGTPGVLIPPAEAARLAKSLPNCKAVDIGPGLNLLQEDNPDLIGSEIARWLSTLEISG

SEQ ID NO: 1999 - protein, 277 aa, Synthetic construct
MFHYVDVGPRDGTPVLFLHGNPTSSYVWRNIIPHVAPTHRCIAPDLIGMGKSDKPDLGYFFDDHVRFMDAFIEALGLEEVVLVIHDWGSALGFHWAKRNPERVKGIAFMEFIRPIPTWDEWPEFARETFQAFRTTDEGRKLIIDQNVFIEGTLPMGVVRPLTEVEMDHYREPFLNPVDREPLWRFPNELPIAGEPANIVALVEEYMDWLHQSPVPKLLFWGTPGVLIPPAEAARLAKSLPNCKAVDIGPGLNLLQEDNPDLIGSEIARWLSTLEISG

SEQ ID NO: 2000 - protein, 277 aa, Synthetic construct
MFHYVDVGPRDGTPVLFLHGNPTSSYVWRNIIPHVAPTHRCIAPDLIGMGKSDKPDLGYFFDDHVRFMDAFIEALGLEEVVLVIHDWGSALGFHWAKRNPERVKGIAFMEFIRPIPTWDEWPEFARETFQAFRTTDTGRKLIIDQNVFIEGTLPMGVVRPLTEVEMDHYREPFLNPVDREPLWRFPNELPIAGEPANIVALVEEYMDWLHQSPVPKLLFWGTPGVLIPPAEAARLAKSLPNCKAVDIGPGLNLLQEDNPDLIGSEIARWLSTLEISG

SEQ ID NO: 2001 - protein, 277 aa, Synthetic construct
MFHYVDVGPRDGTPVLFLHGNPTSSYVWRNIIPHVAPTHRCIAPDLIGMGKSDKPDLGYFFDDHVRFMDAFIEALGLEEVVLVIHDWGSALGFHWAKRNPERVKGIAFMEFIRPIPTWDEWPEFARETFQAFRTTDIGRKLIIDQNVFIEGTLPMGVVRPLTEVEMDHYREPFLNPVDREPLWRFPNELPIAGEPANIVALVEEYMDWLHQSPVPKLLFWGTPGVLIPPAEAARLAKSLPNCKAVDIGPGLNLLQEDNPDLIGSEIARWLSTLEISG

SEQ ID NO: 2002 - protein, 277 aa, Synthetic construct
MFHYVDVGPRDGTPVLFLHGNPTSSYVWRNIIPHVAPTHRCIAPDLIGMGKSDKPDLGYFFDDHVRFMDAFIEALGLEEVVLVIHDWGSALGFHWAKRNPERVKGIAFMEFIRPIPTWDEWPEFARETFQAFRTTDGGRKLIIDQNVFIEGTLPMGVVRPLTEVEMDHYREPFLNPVDREPLWRFPNELPIAGEPANIVALVEEYMDWLHQSPVPKLLFWGTPGVLIPPAEAARLAKSLPNCKAVDIGPGLNLLQEDNPDLIGSEIARWLSTLEISG

SEQ ID NO: 2003 - protein, 277 aa, Synthetic construct
MFHYVDVGPRDGTPVLFLHGNPTSSYVWRNIIPHVAPTHRCIAPDLIGMGKSDKPDLGYFFDDHVRFMDAFIEALGLEEVVLVIHDWGSALGFHWAKRNPERVKGIAFMEFIRPIPTWDEWPEFARETFQAFRTTDLGRKLIIDQNVFIEGTLPMGVVRPLTEVEMDHYREPFLNPVDREPLWRFPNELPIAGEPANIVALVEEYMDWLHQSPVPKLLFWGTPGVLIPPAEAARLAKSLPNCKAVDIGPGLNLLQEDNPDLIGSEIARWLSTLEISG

SEQ ID NO: 2004 - protein, 277 aa, Synthetic construct
MFHYVDVGPRDGTPVLFLHGNPTSSYVWRNIIPHVAPTHRCIAPDLIGMGKSDKPDLGYFFDDHVRFMDAFIEALGLEEVVLVIHDWGSALGFHWAKRNPERVKGIAFMEFIRPIPTWDEWPEFARETFQAFRTTDVARKLIIDQNVFIEGTLPMGVVRPLTEVEMDHYREPFLNPVDREPLWRFPNELPIAGEPANIVALVEEYMDWLHQSPVPKLLFWGTPGVLIPPAEAARLAKSLPNCKAVDIGPGLNLLQEDNPDLIGSEIARWLSTLEISG

SEQ ID NO: 2005 - protein, 277 aa, Synthetic construct
MFHYVDVGPRDGTPVLFLHGNPTSSYVWRNIIPHVAPTHRCIAPDLIGMGKSDKPDLGYFFDDHVRFMDAFIEALGLEEVVLVIHDWGSALGFHWAKRNPERVKGIAFMEFIRPIPTWDEWPEFARETFQAFRTTDVSRKLIIDQNVFIEGTLPMGVVRPLTEVEMDHYREPFLNPVDREPLWRFPNELPIAGEPANIVALVEEYMDWLHQSPVPKLLFWGTPGVLIPPAEAARLAKSLPNCKAVDIGPGLNLLQEDNPDLIGSEIARWLSTLEISG

SEQ ID NO: 2006 - protein, 277 aa, Synthetic construct
MFHYVDVGPRDGTPVLFLHGNPTSSYVWRNIIPHVAPTHRCIAPDLIGMGKSDKPDLGYFFDDHVRFMDAFIEALGLEEVVLVIHDWGSALGFHWAKRNPERVKGIAFMEFIRPIPTWDEWPEFARETFQAFRTTDVDRKLIIDQNVFIEGTLPMGVVRPLTEVEMDHYREPFLNPVDREPLWRFPNELPIAGEPANIVALVEEYMDWLHQSPVPKLLFWGTPGVLIPPAEAARLAKSLPNCKAVDIGPGLNLLQEDNPDLIGSEIARWLSTLEISG

SEQ ID NO: 2007 - protein, 277 aa, Synthetic construct
MFHYVDVGPRDGTPVLFLHGNPTSSYVWRNIIPHVAPTHRCIAPDLIGMGKSDKPDLGYFFDDHVRFMDAFIEALGLEEVVLVIHDWGSALGFHWAKRNPERVKGIAFMEFIRPIPTWDEWPEFARETFQAFRTTDVERKLIIDQNVFIEGTLPMGVVRPLTEVEMDHYREPFLNPVDREPLWRFPNELPIAGEPANIVALVEEYMDWLHQSPVPKLLFWGTPGVLIPPAEAARLAKSLPNCKAVDIGPGLNLLQEDNPDLIGSEIARWLSTLEISG

SEQ ID NO: 2008 - protein, 277 aa, Synthetic construct
MFHYVDVGPRDGTPVLFLHGNPTSSYVWRNIIPHVAPTHRCIAPDLIGMGKSDKPDLGYFFDDHVRFMDAFIEALGLEEVVLVIHDWGSALGFHWAKRNPERVKGIAFMEFIRPIPTWDEWPEFARETFQAFRTTDVTRKLIIDQNVFIEGTLPMGVVRPLTEVEMDHYREPFLNPVDREPLWRFPNELPIAGEPANIVALVEEYMDWLHQSPVPKLLFWGTPGVLIPPAEAARLAKSLPNCKAVDIGPGLNLLQEDNPDLIGSEIARWLSTLEISG

SEQ ID NO: 2009 - protein, 277 aa, Synthetic construct
MFHYVDVGPRDGTPVLFLHGNPTSSYVWRNIIPHVAPTHRCIAPDLIGMGKSDKPDLGYFFDDHVRFMDAFIEALGLEEVVLVIHDWGSALGFHWAKRNPERVKGIAFMEFIRPIPTWDEWPEFARETFQAFRTTDVNRKLIIDQNVFIEGTLPMGVVRPLTEVEMDHYREPFLNPVDREPLWRFPNELPIAGEPANIVALVEEYMDWLHQSPVPKLLFWGTPGVLIPPAEAARLAKSLPNCKAVDIGPGLNLLQEDNPDLIGSEIARWLSTLEISG

SEQ ID NO: 2010 - protein, 277 aa, Synthetic construct
MFHYVDVGPRDGTPVLFLHGNPTSSYVWRNIIPHVAPTHRCIAPDLIGMGKSDKPDLGYFFDDHVRFMDAFIEALGLEEVVLVIHDWGSALGFHWAKRNPERVKGIAFMEFIRPIPTWDEWPEFARETFQAFRTTDVGEKLIIDQNVFIEGTLPMGVVRPLTEVEMDHYREPFLNPVDREPLWRFPNELPIAGEPANIVALVEEYMDWLHQSPVPKLLFWGTPGVLIPPAEAARLAKSLPNCKAVDIGPGLNLLQEDNPDLIGSEIARWLSTLEISG

SEQ ID NO: 2011 - protein, 277 aa, Synthetic construct
MFHYVDVGPRDGTPVLFLHGNPTSSYVWRNIIPHVAPTHRCIAPDLIGMGKSDKPDLGYFFDDHVRFMDAFIEALGLEEVVLVIHDWGSALGFHWAKRNPERVKGIAFMEFIRPIPTWDEWPEFARETFQAFRTTDVGQKLIIDQNVFIEGTLPMGVVRPLTEVEMDHYREPFLNPVDREPLWRFPNELPIAGEPANIVALVEEYMDWLHQSPVPKLLFWGTPGVLIPPAEAARLAKSLPNCKAVDIGPGLNLLQEDNPDLIGSEIARWLSTLEISG

SEQ ID NO: 2012 - protein, 277 aa, Synthetic construct
MFHYVDVGPRDGTPVLFLHGNPTSSYVWRNIIPHVAPTHRCIAPDLIGMGKSDKPDLGYFFDDHVRFMDAFIEALGLEEVVLVIHDWGSALGFHWAKRNPERVKGIAFMEFIRPIPTWDEWPEFARETFQAFRTTDVGKKLIIDQNVFIEGTLPMGVVRPLTEVEMDHYREPFLNPVDREPLWRFPNELPIAGEPANIVALVEEYMDWLHQSPVPKLLFWGTPGVLIPPAEAARLAKSLPNCKAVDIGPGLNLLQEDNPDLIGSEIARWLSTLEISG

SEQ ID NO: 2013 - protein, 277 aa, Synthetic construct
MFHYVDVGPRDGTPVLFLHGNPTSSYVWRNIIPHVAPTHRCIAPDLIGMGKSDKPDLGYFFDDHVRFMDAFIEALGLEEVVLVIHDWGSALGFHWAKRNPERVKGIAFMEFIRPIPTWDEWPEFARETFQAFRTTDVGAKLIIDQNVFIEGTLPMGVVRPLTEVEMDHYREPFLNPVDREPLWRFPNELPIAGEPANIVALVEEYMDWLHQSPVPKLLFWGTPGVLIPPAEAARLAKSLPNCKAVDIGPGLNLLQEDNPDLIGSEIARWLSTLEISG

SEQ ID NO: 2014 - protein, 277 aa, Synthetic construct
MFHYVDVGPRDGTPVLFLHGNPTSSYVWRNIIPHVAPTHRCIAPDLIGMGKSDKPDLGYFFDDHVRFMDAFIEALGLEEVVLVIHDWGSALGFHWAKRNPERVKGIAFMEFIRPIPTWDEWPEFARETFQAFRTTDVGDKLIIDQNVFIEGTLPMGVVRPLTEVEMDHYREPFLNPVDREPLWRFPNELPIAGEPANIVALVEEYMDWLHQSPVPKLLFWGTPGVLIPPAEAARLAKSLPNCKAVDIGPGLNLLQEDNPDLIGSEIARWLSTLEISG

SEQ ID NO: 2015 - protein, 277 aa, Synthetic construct
MFHYVDVGPRDGTPVLFLHGNPTSSYVWRNIIPHVAPTHRCIAPDLIGMGKSDKPDLGYFFDDHVRFMDAFIEALGLEEVVLVIHDWGSALGFHWAKRNPERVKGIAFMEFIRPIPTWDEWPEFARETFQAFRTTDVGHKLIIDQNVFIEGTLPMGVVRPLTEVEMDHYREPFLNPVDREPLWRFPNELPIAGEPANIVALVEEYMDWLHQSPVPKLLFWGTPGVLIPPAEAARLAKSLPNCKAVDIGPGLNLLQEDNPDLIGSEIARWLSTLEISG

SEQ ID NO: 2016 - protein, 277 aa, Synthetic construct
MFHYVDVGPRDGTPVLFLHGNPTSSYVWRNIIPHVAPTHRCIAPDLIGMGKSDKPDLGYFFDDHVRFMDAFIEALGLEEVVLVIHDWGSALGFHWAKRNPERVKGIAFMEFIRPIPTWDEWPEFARETFQAFRTTDVGRELIIDQNVFIEGTLPMGVVRPLTEVEMDHYREPFLNPVDREPLWRFPNELPIAGEPANIVALVEEYMDWLHQSPVPKLLFWGTPGVLIPPAEAARLAKSLPNCKAVDIGPGLNLLQEDNPDLIGSEIARWLSTLEISG

SEQ ID NO: 2017 - protein, 277 aa, Synthetic construct
MFHYVDVGPRDGTPVLFLHGNPTSSYVWRNIIPHVAPTHRCIAPDLIGMGKSDKPDLGYFFDDHVRFMDAFIEALGLEEVVLVIHDWGSALGFHWAKRNPERVKGIAFMEFIRPIPTWDEWPEFARETFQAFRTTDVGRQLIIDQNVFIEGTLPMGVVRPLTEVEMDHYREPFLNPVDREPLWRFPNELPIAGEPANIVALVEEYMDWLHQSPVPKLLFWGTPGVLIPPAEAARLAKSLPNCKAVDIGPGLNLLQEDNPDLIGSEIARWLSTLEISG

SEQ ID NO: 2018 - protein, 277 aa, Synthetic construct
MFHYVDVGPRDGTPVLFLHGNPTSSYVWRNIIPHVAPTHRCIAPDLIGMGKSDKPDLGYFFDDHVRFMDAFIEALGLEEVVLVIHDWGSALGFHWAKRNPERVKGIAFMEFIRPIPTWDEWPEFARETFQAFRTTDVGRDLIIDQNVFIEGTLPMGVVRPLTEVEMDHYREPFLNPVDREPLWRFPNELPIAGEPANIVALVEEYMDWLHQSPVPKLLFWGTPGVLIPPAEAARLAKSLPNCKAVDIGPGLNLLQEDNPDLIGSEIARWLSTLEISG

SEQ ID NO: 2019 - protein, 277 aa, Synthetic construct
MFHYVDVGPRDGTPVLFLHGNPTSSYVWRNIIPHVAPTHRCIAPDLIGMGKSDKPDLGYFFDDHVRFMDAFIEALGLEEVVLVIHDWGSALGFHWAKRNPERVKGIAFMEFIRPIPTWDEWPEFARETFQAFRTTDVGRRLIIDQNVFIEGTLPMGVVRPLTEVEMDHYREPFLNPVDREPLWRFPNELPIAGEPANIVALVEEYMDWLHQSPVPKLLFWGTPGVLIPPAEAARLAKSLPNCKAVDIGPGLNLLQEDNPDLIGSEIARWLSTLEISG

SEQ ID NO: 2020 - protein, 277 aa, Synthetic construct
MFHYVDVGPRDGTPVLFLHGNPTSSYVWRNIIPHVAPTHRCIAPDLIGMGKSDKPDLGYFFDDHVRFMDAFIEALGLEEVVLVIHDWGSALGFHWAKRNPERVKGIAFMEFIRPIPTWDEWPEFARETFQAFRTTDVGRALIIDQNVFIEGTLPMGVVRPLTEVEMDHYREPFLNPVDREPLWRFPNELPIAGEPANIVALVEEYMDWLHQSPVPKLLFWGTPGVLIPPAEAARLAKSLPNCKAVDIGPGLNLLQEDNPDLIGSEIARWLSTLEISG

SEQ ID NO: 2021 - protein, 277 aa, Synthetic construct
MFHYVDVGPRDGTPVLFLHGNPTSSYVWRNIIPHVAPTHRCIAPDLIGMGKSDKPDLGYFFDDHVRFMDAFIEALGLEEVVLVIHDWGSALGFHWAKRNPERVKGIAFMEFIRPIPTWDEWPEFARETFQAFRTTDVGRSLIIDQNVFIEGTLPMGVVRPLTEVEMDHYREPFLNPVDREPLWRFPNELPIAGEPANIVALVEEYMDWLHQSPVPKLLFWGTPGVLIPPAEAARLAKSLPNCKAVDIGPGLNLLQEDNPDLIGSEIARWLSTLEISG

SEQ ID NO: 2022 - protein, 277 aa, Synthetic construct
MFHYVDVGPRDGTPVLFLHGNPTSSYVWRNIIPHVAPTHRCIAPDLIGMGKSDKPDLGYFFDDHVRFMDAFIEALGLEEVVLVIHDWGSALGFHWAKRNPERVKGIAFMEFIRPIPTWDEWPEFARETFQAFRTTDVGRKMIIDQNVFIEGTLPMGVVRPLTEVEMDHYREPFLNPVDREPLWRFPNELPIAGEPANIVALVEEYMDWLHQSPVPKLLFWGTPGVLIPPAEAARLAKSLPNCKAVDIGPGLNLLQEDNPDLIGSEIARWLSTLEISG

SEQ ID NO: 2023 - protein, 277 aa, Synthetic construct
MFHYVDVGPRDGTPVLFLHGNPTSSYVWRNIIPHVAPTHRCIAPDLIGMGKSDKPDLGYFFDDHVRFMDAFIEALGLEEVVLVIHDWGSALGFHWAKRNPERVKGIAFMEFIRPIPTWDEWPEFARETFQAFRTTDVGRKAIIDQNVFIEGTLPMGVVRPLTEVEMDHYREPFLNPVDREPLWRFPNELPIAGEPANIVALVEEYMDWLHQSPVPKLLFWGTPGVLIPPAEAARLAKSLPNCKAVDIGPGLNLLQEDNPDLIGSEIARWLSTLEISG

SEQ ID NO: 2024 - protein, 277 aa, Synthetic construct
MFHYVDVGPRDGTPVLFLHGNPTSSYVWRNIIPHVAPTHRCIAPDLIGMGKSDKPDLGYFFDDHVRFMDAFIEALGLEEVVLVIHDWGSALGFHWAKRNPERVKGIAFMEFIRPIPTWDEWPEFARETFQAFRTTDVGRKIIIDQNVFIEGTLPMGVVRPLTEVEMDHYREPFLNPVDREPLWRFPNELPIAGEPANIVALVEEYMDWLHQSPVPKLLFWGTPGVLIPPAEAARLAKSLPNCKAVDIGPGLNLLQEDNPDLIGSEIARWLSTLEISG

SEQ ID NO: 2025 - protein, 277 aa, Synthetic construct
MFHYVDVGPRDGTPVLFLHGNPTSSYVWRNIIPHVAPTHRCIAPDLIGMGKSDKPDLGYFFDDHVRFMDAFIEALGLEEVVLVIHDWGSALGFHWAKRNPERVKGIAFMEFIRPIPTWDEWPEFARETFQAFRTTDVGRKVIIDQNVFIEGTLPMGVVRPLTEVEMDHYREPFLNPVDREPLWRFPNELPIAGEPANIVALVEEYMDWLHQSPVPKLLFWGTPGVLIPPAEAARLAKSLPNCKAVDIGPGLNLLQEDNPDLIGSEIARWLSTLEISG

SEQ ID NO: 2026 - protein, 277 aa, Synthetic construct
MFHYVDVGPRDGTPVLFLHGNPTSSYVWRNIIPHVAPTHRCIAPDLIGMGKSDKPDLGYFFDDHVRFMDAFIEALGLEEVVLVIHDWGSALGFHWAKRNPERVKGIAFMEFIRPIPTWDEWPEFARETFQAFRTTDVGRKQIIDQNVFIEGTLPMGVVRPLTEVEMDHYREPFLNPVDREPLWRFPNELPIAGEPANIVALVEEYMDWLHQSPVPKLLFWGTPGVLIPPAEAARLAKSLPNCKAVDIGPGLNLLQEDNPDLIGSEIARWLSTLEISG

SEQ ID NO: 2027 - protein, 277 aa, Synthetic construct
MFHYVDVGPRDGTPVLFLHGNPTSSYVWRNIIPHVAPTHRCIAPDLIGMGKSDKPDLGYFFDDHVRFMDAFIEALGLEEVVLVIHDWGSALGFHWAKRNPERVKGIAFMEFIRPIPTWDEWPEFARETFQAFRTTDVGRKTIIDQNVFIEGTLPMGVVRPLTEVEMDHYREPFLNPVDREPLWRFPNELPIAGEPANIVALVEEYMDWLHQSPVPKLLFWGTPGVLIPPAEAARLAKSLPNCKAVDIGPGLNLLQEDNPDLIGSEIARWLSTLEISG

SEQ ID NO: 2028 - protein, 277 aa, Synthetic construct
MFHYVDVGPRDGTPVLFLHGNPTSSYVWRNIIPHVAPTHRCIAPDLIGMGKSDKPDLGYFFDDHVRFMDAFIEALGLEEVVLVIHDWGSALGFHWAKRNPERVKGIAFMEFIRPIPTWDEWPEFARETFQAFRTTDVGRKLVIDQNVFIEGTLPMGVVRPLTEVEMDHYREPFLNPVDREPLWRFPNELPIAGEPANIVALVEEYMDWLHQSPVPKLLFWGTPGVLIPPAEAARLAKSLPNCKAVDIGPGLNLLQEDNPDLIGSEIARWLSTLEISG

SEQ ID NO: 2029 - protein, 277 aa, Synthetic construct
MFHYVDVGPRDGTPVLFLHGNPTSSYVWRNIIPHVAPTHRCIAPDLIGMGKSDKPDLGYFFDDHVRFMDAFIEALGLEEVVLVIHDWGSALGFHWAKRNPERVKGIAFMEFIRPIPTWDEWPEFARETFQAFRTTDVGRKLLIDQNVFIEGTLPMGVVRPLTEVEMDHYREPFLNPVDREPLWRFPNELPIAGEPANIVALVEEYMDWLHQSPVPKLLFWGTPGVLIPPAEAARLAKSLPNCKAVDIGPGLNLLQEDNPDLIGSEIARWLSTLEISG

SEQ ID NO: 2030 - protein, 277 aa, Synthetic construct
MFHYVDVGPRDGTPVLFLHGNPTSSYVWRNIIPHVAPTHRCIAPDLIGMGKSDKPDLGYFFDDHVRFMDAFIEALGLEEVVLVIHDWGSALGFHWAKRNPERVKGIAFMEFIRPIPTWDEWPEFARETFQAFRTTDVGRKLAIDQNVFIEGTLPMGVVRPLTEVEMDHYREPFLNPVDREPLWRFPNELPIAGEPANIVALVEEYMDWLHQSPVPKLLFWGTPGVLIPPAEAARLAKSLPNCKAVDIGPGLNLLQEDNPDLIGSEIARWLSTLEISG

SEQ ID NO: 2031 - protein, 277 aa, Synthetic construct
MFHYVDVGPRDGTPVLFLHGNPTSSYVWRNIIPHVAPTHRCIAPDLIGMGKSDKPDLGYFFDDHVRFMDAFIEALGLEEVVLVIHDWGSALGFHWAKRNPERVKGIAFMEFIRPIPTWDEWPEFARETFQAFRTTDVGRKLMIDQNVFIEGTLPMGVVRPLTEVEMDHYREPFLNPVDREPLWRFPNELPIAGEPANIVALVEEYMDWLHQSPVPKLLFWGTPGVLIPPAEAARLAKSLPNCKAVDIGPGLNLLQEDNPDLIGSEIARWLSTLEISG

SEQ ID NO: 2032 - protein, 277 aa, Synthetic construct
MFHYVDVGPRDGTPVLFLHGNPTSSYVWRNIIPHVAPTHRCIAPDLIGMGKSDKPDLGYFFDDHVRFMDAFIEALGLEEVVLVIHDWGSALGFHWAKRNPERVKGIAFMEFIRPIPTWDEWPEFARETFQAFRTTDVGRKLTIDQNVFIEGTLPMGVVRPLTEVEMDHYREPFLNPVDREPLWRFPNELPIAGEPANIVALVEEYMDWLHQSPVPKLLFWGTPGVLIPPAEAARLAKSLPNCKAVDIGPGLNLLQEDNPDLIGSEIARWLSTLEISG

SEQ ID NO: 2033 - protein, 277 aa, Synthetic construct
MFHYVDVGPRDGTPVLFLHGNPTSSYVWRNIIPHVAPTHRCIAPDLIGMGKSDKPDLGYFFDDHVRFMDAFIEALGLEEVVLVIHDWGSALGFHWAKRNPERVKGIAFMEFIRPIPTWDEWPEFARETFQAFRTTDVGRKLFIDQNVFIEGTLPMGVVRPLTEVEMDHYREPFLNPVDREPLWRFPNELPIAGEPANIVALVEEYMDWLHQSPVPKLLFWGTPGVLIPPAEAARLAKSLPNCKAVDIGPGLNLLQEDNPDLIGSEIARWLSTLEISG

SEQ ID NO: 2034 - protein, 277 aa, Synthetic construct
MFHYVDVGPRDGTPVLFLHGNPTSSYVWRNIIPHVAPTHRCIAPDLIGMGKSDKPDLGYFFDDHVRFMDAFIEALGLEEVVLVIHDWGSALGFHWAKRNPERVKGIAFMEFIRPIPTWDEWPEFARETFQAFRTTDVGRKLILDQNVFIEGTLPMGVVRPLTEVEMDHYREPFLNPVDREPLWRFPNELPIAGEPANIVALVEEYMDWLHQSPVPKLLFWGTPGVLIPPAEAARLAKSLPNCKAVDIGPGLNLLQEDNPDLIGSEIARWLSTLEISG

SEQ ID NO: 2035 - protein, 277 aa, Synthetic construct
MFHYVDVGPRDGTPVLFLHGNPTSSYVWRNIIPHVAPTHRCIAPDLIGMGKSDKPDLGYFFDDHVRFMDAFIEALGLEEVVLVIHDWGSALGFHWAKRNPERVKGIAFMEFIRPIPTWDEWPEFARETFQAFRTTDVGRKLIMDQNVFIEGTLPMGVVRPLTEVEMDHYREPFLNPVDREPLWRFPNELPIAGEPANIVALVEEYMDWLHQSPVPKLLFWGTPGVLIPPAEAARLAKSLPNCKAVDIGPGLNLLQEDNPDLIGSEIARWLSTLEISG

SEQ ID NO: 2036 - protein, 277 aa, Synthetic construct
MFHYVDVGPRDGTPVLFLHGNPTSSYVWRNIIPHVAPTHRCIAPDLIGMGKSDKPDLGYFFDDHVRFMDAFIEALGLEEVVLVIHDWGSALGFHWAKRNPERVKGIAFMEFIRPIPTWDEWPEFARETFQAFRTTDVGRKLIVDQNVFIEGTLPMGVVRPLTEVEMDHYREPFLNPVDREPLWRFPNELPIAGEPANIVALVEEYMDWLHQSPVPKLLFWGTPGVLIPPAEAARLAKSLPNCKAVDIGPGLNLLQEDNPDLIGSEIARWLSTLEISG

SEQ ID NO: 2037 - protein, 277 aa, Synthetic construct
MFHYVDVGPRDGTPVLFLHGNPTSSYVWRNIIPHVAPTHRCIAPDLIGMGKSDKPDLGYFFDDHVRFMDAFIEALGLEEVVLVIHDWGSALGFHWAKRNPERVKGIAFMEFIRPIPTWDEWPEFARETFQAFRTTDVGRKLIFDQNVFIEGTLPMGVVRPLTEVEMDHYREPFLNPVDREPLWRFPNELPIAGEPANIVALVEEYMDWLHQSPVPKLLFWGTPGVLIPPAEAARLAKSLPNCKAVDIGPGLNLLQEDNPDLIGSEIARWLSTLEISG

SEQ ID NO: 2038 - protein, 277 aa, Synthetic construct
MFHYVDVGPRDGTPVLFLHGNPTSSYVWRNIIPHVAPTHRCIAPDLIGMGKSDKPDLGYFFDDHVRFMDAFIEALGLEEVVLVIHDWGSALGFHWAKRNPERVKGIAFMEFIRPIPTWDEWPEFARETFQAFRTTDVGRKLITDQNVFIEGTLPMGVVRPLTEVEMDHYREPFLNPVDREPLWRFPNELPIAGEPANIVALVEEYMDWLHQSPVPKLLFWGTPGVLIPPAEAARLAKSLPNCKAVDIGPGLNLLQEDNPDLIGSEIARWLSTLEISG

SEQ ID NO: 2039 - protein, 277 aa, Synthetic construct
MFHYVDVGPRDGTPVLFLHGNPTSSYVWRNIIPHVAPTHRCIAPDLIGMGKSDKPDLGYFFDDHVRFMDAFIEALGLEEVVLVIHDWGSALGFHWAKRNPERVKGIAFMEFIRPIPTWDEWPEFARETFQAFRTTDVGRKLIADQNVFIEGTLPMGVVRPLTEVEMDHYREPFLNPVDREPLWRFPNELPIAGEPANIVALVEEYMDWLHQSPVPKLLFWGTPGVLIPPAEAARLAKSLPNCKAVDIGPGLNLLQEDNPDLIGSEIARWLSTLEISG

SEQ ID NO: 2040 - protein, 277 aa, Synthetic construct
MFHYVDVGPRDGTPVLFLHGNPTSSYVWRNIIPHVAPTHRCIAPDLIGMGKSDKPDLGYFFDDHVRFMDAFIEALGLEEVVLVIHDWGSALGFHWAKRNPERVKGIAFMEFIRPIPTWDEWPEFARETFQAFRTTDVGRKLIIEQNVFIEGTLPMGVVRPLTEVEMDHYREPFLNPVDREPLWRFPNELPIAGEPANIVALVEEYMDWLHQSPVPKLLFWGTPGVLIPPAEAARLAKSLPNCKAVDIGPGLNLLQEDNPDLIGSEIARWLSTLEISG

SEQ ID NO: 2041 - protein, 277 aa, Synthetic construct
MFHYVDVGPRDGTPVLFLHGNPTSSYVWRNIIPHVAPTHRCIAPDLIGMGKSDKPDLGYFFDDHVRFMDAFIEALGLEEVVLVIHDWGSALGFHWAKRNPERVKGIAFMEFIRPIPTWDEWPEFARETFQAFRTTDVGRKLIIQQNVFIEGTLPMGVVRPLTEVEMDHYREPFLNPVDREPLWRFPNELPIAGEPANIVALVEEYMDWLHQSPVPKLLFWGTPGVLIPPAEAARLAKSLPNCKAVDIGPGLNLLQEDNPDLIGSEIARWLSTLEISG

SEQ ID NO: 2042 - protein, 277 aa, Synthetic construct
MFHYVDVGPRDGTPVLFLHGNPTSSYVWRNIIPHVAPTHRCIAPDLIGMGKSDKPDLGYFFDDHVRFMDAFIEALGLEEVVLVIHDWGSALGFHWAKRNPERVKGIAFMEFIRPIPTWDEWPEFARETFQAFRTTDVGRKLIINQNVFIEGTLPMGVVRPLTEVEMDHYREPFLNPVDREPLWRFPNELPIAGEPANIVALVEEYMDWLHQSPVPKLLFWGTPGVLIPPAEAARLAKSLPNCKAVDIGPGLNLLQEDNPDLIGSEIARWLSTLEISG

SEQ ID NO: 2043 - protein, 277 aa, Synthetic construct
MFHYVDVGPRDGTPVLFLHGNPTSSYVWRNIIPHVAPTHRCIAPDLIGMGKSDKPDLGYFFDDHVRFMDAFIEALGLEEVVLVIHDWGSALGFHWAKRNPERVKGIAFMEFIRPIPTWDEWPEFARETFQAFRTTDVGRKLIIGQNVFIEGTLPMGVVRPLTEVEMDHYREPFLNPVDREPLWRFPNELPIAGEPANIVALVEEYMDWLHQSPVPKLLFWGTPGVLIPPAEAARLAKSLPNCKAVDIGPGLNLLQEDNPDLIGSEIARWLSTLEISG

SEQ ID NO: 2044 - protein, 277 aa, Synthetic construct
MFHYVDVGPRDGTPVLFLHGNPTSSYVWRNIIPHVAPTHRCIAPDLIGMGKSDKPDLGYFFDDHVRFMDAFIEALGLEEVVLVIHDWGSALGFHWAKRNPERVKGIAFMEFIRPIPTWDEWPEFARETFQAFRTTDVGRKLIIKQNVFIEGTLPMGVVRPLTEVEMDHYREPFLNPVDREPLWRFPNELPIAGEPANIVALVEEYMDWLHQSPVPKLLFWGTPGVLIPPAEAARLAKSLPNCKAVDIGPGLNLLQEDNPDLIGSEIARWLSTLEISG

SEQ ID NO: 2045 - protein, 277 aa, Synthetic construct
MFHYVDVGPRDGTPVLFLHGNPTSSYVWRNIIPHVAPTHRCIAPDLIGMGKSDKPDLGYFFDDHVRFMDAFIEALGLEEVVLVIHDWGSALGFHWAKRNPERVKGIAFMEFIRPIPTWDEWPEFARETFQAFRTTDVGRKLIISQNVFIEGTLPMGVVRPLTEVEMDHYREPFLNPVDREPLWRFPNELPIAGEPANIVALVEEYMDWLHQSPVPKLLFWGTPGVLIPPAEAARLAKSLPNCKAVDIGPGLNLLQEDNPDLIGSEIARWLSTLEISG

SEQ ID NO: 2046 - protein, 277 aa, Synthetic construct
MFHYVDVGPRDGTPVLFLHGNPTSSYVWRNIIPHVAPTHRCIAPDLIGMGKSDKPDLGYFFDDHVRFMDAFIEALGLEEVVLVIHDWGSALGFHWAKRNPERVKGIAFMEFIRPIPTWDEWPEFARETFQAFRTTDVGRKLIIDKNVFIEGTLPMGVVRPLTEVEMDHYREPFLNPVDREPLWRFPNELPIAGEPANIVALVEEYMDWLHQSPVPKLLFWGTPGVLIPPAEAARLAKSLPNCKAVDIGPGLNLLQEDNPDLIGSEIARWLSTLEISG

SEQ ID NO: 2047 - protein, 277 aa, Synthetic construct
MFHYVDVGPRDGTPVLFLHGNPTSSYVWRNIIPHVAPTHRCIAPDLIGMGKSDKPDLGYFFDDHVRFMDAFIEALGLEEVVLVIHDWGSALGFHWAKRNPERVKGIAFMEFIRPIPTWDEWPEFARETFQAFRTTDVGRKLIIDRNVFIEGTLPMGVVRPLTEVEMDHYREPFLNPVDREPLWRFPNELPIAGEPANIVALVEEYMDWLHQSPVPKLLFWGTPGVLIPPAEAARLAKSLPNCKAVDIGPGLNLLQEDNPDLIGSEIARWLSTLEISG

SEQ ID NO: 2048 - protein, 277 aa, Synthetic construct
MFHYVDVGPRDGTPVLFLHGNPTSSYVWRNIIPHVAPTHRCIAPDLIGMGKSDKPDLGYFFDDHVRFMDAFIEALGLEEVVLVIHDWGSALGFHWAKRNPERVKGIAFMEFIRPIPTWDEWPEFARETFQAFRTTDVGRKLIIDENVFIEGTLPMGVVRPLTEVEMDHYREPFLNPVDREPLWRFPNELPIAGEPANIVALVEEYMDWLHQSPVPKLLFWGTPGVLIPPAEAARLAKSLPNCKAVDIGPGLNLLQEDNPDLIGSEIARWLSTLEISG

SEQ ID NO: 2049 - protein, 277 aa, Synthetic construct
MFHYVDVGPRDGTPVLFLHGNPTSSYVWRNIIPHVAPTHRCIAPDLIGMGKSDKPDLGYFFDDHVRFMDAFIEALGLEEVVLVIHDWGSALGFHWAKRNPERVKGIAFMEFIRPIPTWDEWPEFARETFQAFRTTDVGRKLIIDDNVFIEGTLPMGVVRPLTEVEMDHYREPFLNPVDREPLWRFPNELPIAGEPANIVALVEEYMDWLHQSPVPKLLFWGTPGVLIPPAEAARLAKSLPNCKAVDIGPGLNLLQEDNPDLIGSEIARWLSTLEISG

SEQ ID NO: 2050 - protein, 277 aa, Synthetic construct
MFHYVDVGPRDGTPVLFLHGNPTSSYVWRNIIPHVAPTHRCIAPDLIGMGKSDKPDLGYFFDDHVRFMDAFIEALGLEEVVLVIHDWGSALGFHWAKRNPERVKGIAFMEFIRPIPTWDEWPEFARETFQAFRTTDVGRKLIIDNNVFIEGTLPMGVVRPLTEVEMDHYREPFLNPVDREPLWRFPNELPIAGEPANIVALVEEYMDWLHQSPVPKLLFWGTPGVLIPPAEAARLAKSLPNCKAVDIGPGLNLLQEDNPDLIGSEIARWLSTLEISG

SEQ ID NO: 2051 - protein, 277 aa, Synthetic construct
MFHYVDVGPRDGTPVLFLHGNPTSSYVWRNIIPHVAPTHRCIAPDLIGMGKSDKPDLGYFFDDHVRFMDAFIEALGLEEVVLVIHDWGSALGFHWAKRNPERVKGIAFMEFIRPIPTWDEWPEFARETFQAFRTTDVGRKLIIDANVFIEGTLPMGVVRPLTEVEMDHYREPFLNPVDREPLWRFPNELPIAGEPANIVALVEEYMDWLHQSPVPKLLFWGTPGVLIPPAEAARLAKSLPNCKAVDIGPGLNLLQEDNPDLIGSEIARWLSTLEISG

SEQ ID NO: 2052 - protein, 277 aa, Synthetic construct
MFHYVDVGPRDGTPVLFLHGNPTSSYVWRNIIPHVAPTHRCIAPDLIGMGKSDKPDLGYFFDDHVRFMDAFIEALGLEEVVLVIHDWGSALGFHWAKRNPERVKGIAFMEFIRPIPTWDEWPEFARETFQAFRTTDVGRKLIIDQSVFIEGTLPMGVVRPLTEVEMDHYREPFLNPVDREPLWRFPNELPIAGEPANIVALVEEYMDWLHQSPVPKLLFWGTPGVLIPPAEAARLAKSLPNCKAVDIGPGLNLLQEDNPDLIGSEIARWLSTLEISG

SEQ ID NO: 2053 - protein, 277 aa, Synthetic construct
MFHYVDVGPRDGTPVLFLHGNPTSSYVWRNIIPHVAPTHRCIAPDLIGMGKSDKPDLGYFFDDHVRFMDAFIEALGLEEVVLVIHDWGSALGFHWAKRNPERVKGIAFMEFIRPIPTWDEWPEFARETFQAFRTTDVGRKLIIDQHVFIEGTLPMGVVRPLTEVEMDHYREPFLNPVDREPLWRFPNELPIAGEPANIVALVEEYMDWLHQSPVPKLLFWGTPGVLIPPAEAARLAKSLPNCKAVDIGPGLNLLQEDNPDLIGSEIARWLSTLEISG

SEQ ID NO: 2054 - protein, 277 aa, Synthetic construct
MFHYVDVGPRDGTPVLFLHGNPTSSYVWRNIIPHVAPTHRCIAPDLIGMGKSDKPDLGYFFDDHVRFMDAFIEALGLEEVVLVIHDWGSALGFHWAKRNPERVKGIAFMEFIRPIPTWDEWPEFARETFQAFRTTDVGRKLIIDQTVFIEGTLPMGVVRPLTEVEMDHYREPFLNPVDREPLWRFPNELPIAGEPANIVALVEEYMDWLHQSPVPKLLFWGTPGVLIPPAEAARLAKSLPNCKAVDIGPGLNLLQEDNPDLIGSEIARWLSTLEISG

SEQ ID NO: 2055 - protein, 277 aa, Synthetic construct
MFHYVDVGPRDGTPVLFLHGNPTSSYVWRNIIPHVAPTHRCIAPDLIGMGKSDKPDLGYFFDDHVRFMDAFIEALGLEEVVLVIHDWGSALGFHWAKRNPERVKGIAFMEFIRPIPTWDEWPEFARETFQAFRTTDVGRKLIIDQDVFIEGTLPMGVVRPLTEVEMDHYREPFLNPVDREPLWRFPNELPIAGEPANIVALVEEYMDWLHQSPVPKLLFWGTPGVLIPPAEAARLAKSLPNCKAVDIGPGLNLLQEDNPDLIGSEIARWLSTLEISG

SEQ ID NO: 2056 - protein, 277 aa, Synthetic construct
MFHYVDVGPRDGTPVLFLHGNPTSSYVWRNIIPHVAPTHRCIAPDLIGMGKSDKPDLGYFFDDHVRFMDAFIEALGLEEVVLVIHDWGSALGFHWAKRNPERVKGIAFMEFIRPIPTWDEWPEFARETFQAFRTTDVGRKLIIDQGVFIEGTLPMGVVRPLTEVEMDHYREPFLNPVDREPLWRFPNELPIAGEPANIVALVEEYMDWLHQSPVPKLLFWGTPGVLIPPAEAARLAKSLPNCKAVDIGPGLNLLQEDNPDLIGSEIARWLSTLEISG

SEQ ID NO: 2057 - protein, 277 aa, Synthetic construct
MFHYVDVGPRDGTPVLFLHGNPTSSYVWRNIIPHVAPTHRCIAPDLIGMGKSDKPDLGYFFDDHVRFMDAFIEALGLEEVVLVIHDWGSALGFHWAKRNPERVKGIAFMEFIRPIPTWDEWPEFARETFQAFRTTDVGRKLIIDQKVFIEGTLPMGVVRPLTEVEMDHYREPFLNPVDREPLWRFPNELPIAGEPANIVALVEEYMDWLHQSPVPKLLFWGTPGVLIPPAEAARLAKSLPNCKAVDIGPGLNLLQEDNPDLIGSEIARWLSTLEISG

SEQ ID NO: 2058 - protein, 277 aa, Synthetic construct
MFHYVDVGPRDGTPVLFLHGNPTSSYVWRNIIPHVAPTHRCIAPDLIGMGKSDKPDLGYFFDDHVRFMDAFIEALGLEEVVLVIHDWGSALGFHWAKRNPERVKGIAFMEFIRPIPTWDEWPEFARETFQAFRTTDVGRKLIIDQNLFIEGTLPMGVVRPLTEVEMDHYREPFLNPVDREPLWRFPNELPIAGEPANIVALVEEYMDWLHQSPVPKLLFWGTPGVLIPPAEAARLAKSLPNCKAVDIGPGLNLLQEDNPDLIGSEIARWLSTLEISG

SEQ ID NO: 2059 - protein, 277 aa, Synthetic construct
MFHYVDVGPRDGTPVLFLHGNPTSSYVWRNIIPHVAPTHRCIAPDLIGMGKSDKPDLGYFFDDHVRFMDAFIEALGLEEVVLVIHDWGSALGFHWAKRNPERVKGIAFMEFIRPIPTWDEWPEFARETFQAFRTTDVGRKLIIDQNIFIEGTLPMGVVRPLTEVEMDHYREPFLNPVDREPLWRFPNELPIAGEPANIVALVEEYMDWLHQSPVPKLLFWGTPGVLIPPAEAARLAKSLPNCKAVDIGPGLNLLQEDNPDLIGSEIARWLSTLEISG

SEQ ID NO: 2060 - protein, 277 aa, Synthetic construct
MFHYVDVGPRDGTPVLFLHGNPTSSYVWRNIIPHVAPTHRCIAPDLIGMGKSDKPDLGYFFDDHVRFMDAFIEALGLEEVVLVIHDWGSALGFHWAKRNPERVKGIAFMEFIRPIPTWDEWPEFARETFQAFRTTDVGRKLIIDQNFFIEGTLPMGVVRPLTEVEMDHYREPFLNPVDREPLWRFPNELPIAGEPANIVALVEEYMDWLHQSPVPKLLFWGTPGVLIPPAEAARLAKSLPNCKAVDIGPGLNLLQEDNPDLIGSEIARWLSTLEISG

SEQ ID NO: 2061 - protein, 277 aa, Synthetic construct
MFHYVDVGPRDGTPVLFLHGNPTSSYVWRNIIPHVAPTHRCIAPDLIGMGKSDKPDLGYFFDDHVRFMDAFIEALGLEEVVLVIHDWGSALGFHWAKRNPERVKGIAFMEFIRPIPTWDEWPEFARETFQAFRTTDVGRKLIIDQNAFIEGTLPMGVVRPLTEVEMDHYREPFLNPVDREPLWRFPNELPIAGEPANIVALVEEYMDWLHQSPVPKLLFWGTPGVLIPPAEAARLAKSLPNCKAVDIGPGLNLLQEDNPDLIGSEIARWLSTLEISG

SEQ ID NO: 2062 - protein, 277 aa, Synthetic construct
MFHYVDVGPRDGTPVLFLHGNPTSSYVWRNIIPHVAPTHRCIAPDLIGMGKSDKPDLGYFFDDHVRFMDAFIEALGLEEVVLVIHDWGSALGFHWAKRNPERVKGIAFMEFIRPIPTWDEWPEFARETFQAFRTTDVGRKLIIDQNMFIEGTLPMGVVRPLTEVEMDHYREPFLNPVDREPLWRFPNELPIAGEPANIVALVEEYMDWLHQSPVPKLLFWGTPGVLIPPAEAARLAKSLPNCKAVDIGPGLNLLQEDNPDLIGSEIARWLSTLEISG

SEQ ID NO: 2063 - protein, 277 aa, Synthetic construct
MFHYVDVGPRDGTPVLFLHGNPTSSYVWRNIIPHVAPTHRCIAPDLIGMGKSDKPDLGYFFDDHVRFMDAFIEALGLEEVVLVIHDWGSALGFHWAKRNPERVKGIAFMEFIRPIPTWDEWPEFARETFQAFRTTDVGRKLIIDQNTFIEGTLPMGVVRPLTEVEMDHYREPFLNPVDREPLWRFPNELPIAGEPANIVALVEEYMDWLHQSPVPKLLFWGTPGVLIPPAEAARLAKSLPNCKAVDIGPGLNLLQEDNPDLIGSEIARWLSTLEISG

SEQ ID NO: 2064 - protein, 277 aa, Synthetic construct
MFHYVDVGPRDGTPVLFLHGNPTSSYVWRNIIPHVAPTHRCIAPDLIGMGKSDKPDLGYFFDDHVRFMDAFIEALGLEEVVLVIHDWGSALGFHWAKRNPERVKGIAFMEFIRPIPTWDEWPEFARETFQAFRTTDVGRKLIIDQNVLIEGTLPMGVVRPLTEVEMDHYREPFLNPVDREPLWRFPNELPIAGEPANIVALVEEYMDWLHQSPVPKLLFWGTPGVLIPPAEAARLAKSLPNCKAVDIGPGLNLLQEDNPDLIGSEIARWLSTLEISG

SEQ ID NO: 2065 - protein, 277 aa, Synthetic construct
MFHYVDVGPRDGTPVLFLHGNPTSSYVWRNIIPHVAPTHRCIAPDLIGMGKSDKPDLGYFFDDHVRFMDAFIEALGLEEVVLVIHDWGSALGFHWAKRNPERVKGIAFMEFIRPIPTWDEWPEFARETFQAFRTTDVGRKLIIDQNVYIEGTLPMGVVRPLTEVEMDHYREPFLNPVDREPLWRFPNELPIAGEPANIVALVEEYMDWLHQSPVPKLLFWGTPGVLIPPAEAARLAKSLPNCKAVDIGPGLNLLQEDNPDLIGSEIARWLSTLEISG

SEQ ID NO: 2066 - protein, 277 aa, Synthetic construct
MFHYVDVGPRDGTPVLFLHGNPTSSYVWRNIIPHVAPTHRCIAPDLIGMGKSDKPDLGYFFDDHVRFMDAFIEALGLEEVVLVIHDWGSALGFHWAKRNPERVKGIAFMEFIRPIPTWDEWPEFARETFQAFRTTDVGRKLIIDQNVMIEGTLPMGVVRPLTEVEMDHYREPFLNPVDREPLWRFPNELPIAGEPANIVALVEEYMDWLHQSPVPKLLFWGTPGVLIPPAEAARLAKSLPNCKAVDIGPGLNLLQEDNPDLIGSEIARWLSTLEISG

SEQ ID NO: 2067 - protein, 277 aa, Synthetic construct
MFHYVDVGPRDGTPVLFLHGNPTSSYVWRNIIPHVAPTHRCIAPDLIGMGKSDKPDLGYFFDDHVRFMDAFIEALGLEEVVLVIHDWGSALGFHWAKRNPERVKGIAFMEFIRPIPTWDEWPEFARETFQAFRTTDVGRKLIIDQNVIIEGTLPMGVVRPLTEVEMDHYREPFLNPVDREPLWRFPNELPIAGEPANIVALVEEYMDWLHQSPVPKLLFWGTPGVLIPPAEAARLAKSLPNCKAVDIGPGLNLLQEDNPDLIGSEIARWLSTLEISG

SEQ ID NO: 2068 - protein, 277 aa, Synthetic construct
MFHYVDVGPRDGTPVLFLHGNPTSSYVWRNIIPHVAPTHRCIAPDLIGMGKSDKPDLGYFFDDHVRFMDAFIEALGLEEVVLVIHDWGSALGFHWAKRNPERVKGIAFMEFIRPIPTWDEWPEFARETFQAFRTTDVGRKLIIDQNVVIEGTLPMGVVRPLTEVEMDHYREPFLNPVDREPLWRFPNELPIAGEPANIVALVEEYMDWLHQSPVPKLLFWGTPGVLIPPAEAARLAKSLPNCKAVDIGPGLNLLQEDNPDLIGSEIARWLSTLEISG

SEQ ID NO: 2069 - protein, 277 aa, Synthetic construct
MFHYVDVGPRDGTPVLFLHGNPTSSYVWRNIIPHVAPTHRCIAPDLIGMGKSDKPDLGYFFDDHVRFMDAFIEALGLEEVVLVIHDWGSALGFHWAKRNPERVKGIAFMEFIRPIPTWDEWPEFARETFQAFRTTDVGRKLIIDQNVWIEGTLPMGVVRPLTEVEMDHYREPFLNPVDREPLWRFPNELPIAGEPANIVALVEEYMDWLHQSPVPKLLFWGTPGVLIPPAEAARLAKSLPNCKAVDIGPGLNLLQEDNPDLIGSEIARWLSTLEISG

SEQ ID NO: 2070 - protein, 277 aa, Synthetic construct
MFHYVDVGPRDGTPVLFLHGNPTSSYVWRNIIPHVAPTHRCIAPDLIGMGKSDKPDLGYFFDDHVRFMDAFIEALGLEEVVLVIHDWGSALGFHWAKRNPERVKGIAFMEFIRPIPTWDEWPEFARETFQAFRTTDVGRKLIIDQNVFVEGTLPMGVVRPLTEVEMDHYREPFLNPVDREPLWRFPNELPIAGEPANIVALVEEYMDWLHQSPVPKLLFWGTPGVLIPPAEAARLAKSLPNCKAVDIGPGLNLLQEDNPDLIGSEIARWLSTLEISG

SEQ ID NO: 2071 - protein, 277 aa, Synthetic construct
MFHYVDVGPRDGTPVLFLHGNPTSSYVWRNIIPHVAPTHRCIAPDLIGMGKSDKPDLGYFFDDHVRFMDAFIEALGLEEVVLVIHDWGSALGFHWAKRNPERVKGIAFMEFIRPIPTWDEWPEFARETFQAFRTTDVGRKLIIDQNVFLEGTLPMGVVRPLTEVEMDHYREPFLNPVDREPLWRFPNELPIAGEPANIVALVEEYMDWLHQSPVPKLLFWGTPGVLIPPAEAARLAKSLPNCKAVDIGPGLNLLQEDNPDLIGSEIARWLSTLEISG

SEQ ID NO: 2072 - protein, 277 aa, Synthetic construct
MFHYVDVGPRDGTPVLFLHGNPTSSYVWRNIIPHVAPTHRCIAPDLIGMGKSDKPDLGYFFDDHVRFMDAFIEALGLEEVVLVIHDWGSALGFHWAKRNPERVKGIAFMEFIRPIPTWDEWPEFARETFQAFRTTDVGRKLIIDQNVFMEGTLPMGVVRPLTEVEMDHYREPFLNPVDREPLWRFPNELPIAGEPANIVALVEEYMDWLHQSPVPKLLFWGTPGVLIPPAEAARLAKSLPNCKAVDIGPGLNLLQEDNPDLIGSEIARWLSTLEISG

SEQ ID NO: 2073 - protein, 277 aa, Synthetic construct
MFHYVDVGPRDGTPVLFLHGNPTSSYVWRNIIPHVAPTHRCIAPDLIGMGKSDKPDLGYFFDDHVRFMDAFIEALGLEEVVLVIHDWGSALGFHWAKRNPERVKGIAFMEFIRPIPTWDEWPEFARETFQAFRTTDVGRKLIIDQNVFAEGTLPMGVVRPLTEVEMDHYREPFLNPVDREPLWRFPNELPIAGEPANIVALVEEYMDWLHQSPVPKLLFWGTPGVLIPPAEAARLAKSLPNCKAVDIGPGLNLLQEDNPDLIGSEIARWLSTLEISG

SEQ ID NO: 2074 - protein, 277 aa, Synthetic construct
MFHYVDVGPRDGTPVLFLHGNPTSSYVWRNIIPHVAPTHRCIAPDLIGMGKSDKPDLGYFFDDHVRFMDAFIEALGLEEVVLVIHDWGSALGFHWAKRNPERVKGIAFMEFIRPIPTWDEWPEFARETFQAFRTTDVGRKLIIDQNVFTEGTLPMGVVRPLTEVEMDHYREPFLNPVDREPLWRFPNELPIAGEPANIVALVEEYMDWLHQSPVPKLLFWGTPGVLIPPAEAARLAKSLPNCKAVDIGPGLNLLQEDNPDLIGSEIARWLSTLEISG

SEQ ID NO: 2075 - protein, 277 aa, Synthetic construct
MFHYVDVGPRDGTPVLFLHGNPTSSYVWRNIIPHVAPTHRCIAPDLIGMGKSDKPDLGYFFDDHVRFMDAFIEALGLEEVVLVIHDWGSALGFHWAKRNPERVKGIAFMEFIRPIPTWDEWPEFARETFQAFRTTDVGRKLIIDQNVFFEGTLPMGVVRPLTEVEMDHYREPFLNPVDREPLWRFPNELPIAGEPANIVALVEEYMDWLHQSPVPKLLFWGTPGVLIPPAEAARLAKSLPNCKAVDIGPGLNLLQEDNPDLIGSEIARWLSTLEISG

SEQ ID NO: 2076 - protein, 277 aa, Synthetic construct
MFHYVDVGPRDGTPVLFLHGNPTSSYVWRNIIPHVAPTHRCIAPDLIGMGKSDKPDLGYFFDDHVRFMDAFIEALGLEEVVLVIHDWGSALGFHWAKRNPERVKGIAFMEFIRPIPTWDEWPEFARETFQAFRTTDVGRKLIIDQNVFIDGTLPMGVVRPLTEVEMDHYREPFLNPVDREPLWRFPNELPIAGEPANIVALVEEYMDWLHQSPVPKLLFWGTPGVLIPPAEAARLAKSLPNCKAVDIGPGLNLLQEDNPDLIGSEIARWLSTLEISG

SEQ ID NO: 2077 - protein, 277 aa, Synthetic construct
MFHYVDVGPRDGTPVLFLHGNPTSSYVWRNIIPHVAPTHRCIAPDLIGMGKSDKPDLGYFFDDHVRFMDAFIEALGLEEVVLVIHDWGSALGFHWAKRNPERVKGIAFMEFIRPIPTWDEWPEFARETFQAFRTTDVGRKLIIDQNVFIQGTLPMGVVRPLTEVEMDHYREPFLNPVDREPLWRFPNELPIAGEPANIVALVEEYMDWLHQSPVPKLLFWGTPGVLIPPAEAARLAKSLPNCKAVDIGPGLNLLQEDNPDLIGSEIARWLSTLEISG

SEQ ID NO: 2078 - protein, 277 aa, Synthetic construct
MFHYVDVGPRDGTPVLFLHGNPTSSYVWRNIIPHVAPTHRCIAPDLIGMGKSDKPDLGYFFDDHVRFMDAFIEALGLEEVVLVIHDWGSALGFHWAKRNPERVKGIAFMEFIRPIPTWDEWPEFARETFQAFRTTDVGRKLIIDQNVFIAGTLPMGVVRPLTEVEMDHYREPFLNPVDREPLWRFPNELPIAGEPANIVALVEEYMDWLHQSPVPKLLFWGTPGVLIPPAEAARLAKSLPNCKAVDIGPGLNLLQEDNPDLIGSEIARWLSTLEISG

SEQ ID NO: 2079 - protein, 277 aa, Synthetic construct
MFHYVDVGPRDGTPVLFLHGNPTSSYVWRNIIPHVAPTHRCIAPDLIGMGKSDKPDLGYFFDDHVRFMDAFIEALGLEEVVLVIHDWGSALGFHWAKRNPERVKGIAFMEFIRPIPTWDEWPEFARETFQAFRTTDVGRKLIIDQNVFIGGTLPMGVVRPLTEVEMDHYREPFLNPVDREPLWRFPNELPIAGEPANIVALVEEYMDWLHQSPVPKLLFWGTPGVLIPPAEAARLAKSLPNCKAVDIGPGLNLLQEDNPDLIGSEIARWLSTLEISG

SEQ ID NO: 2080 - protein, 277 aa, Synthetic construct
MFHYVDVGPRDGTPVLFLHGNPTSSYVWRNIIPHVAPTHRCIAPDLIGMGKSDKPDLGYFFDDHVRFMDAFIEALGLEEVVLVIHDWGSALGFHWAKRNPERVKGIAFMEFIRPIPTWDEWPEFARETFQAFRTTDVGRKLIIDQNVFISGTLPMGVVRPLTEVEMDHYREPFLNPVDREPLWRFPNELPIAGEPANIVALVEEYMDWLHQSPVPKLLFWGTPGVLIPPAEAARLAKSLPNCKAVDIGPGLNLLQEDNPDLIGSEIARWLSTLEISG

SEQ ID NO: 2081 - protein, 277 aa, Synthetic construct
MFHYVDVGPRDGTPVLFLHGNPTSSYVWRNIIPHVAPTHRCIAPDLIGMGKSDKPDLGYFFDDHVRFMDAFIEALGLEEVVLVIHDWGSALGFHWAKRNPERVKGIAFMEFIRPIPTWDEWPEFARETFQAFRTTDVGRKLIIDQNVFIKGTLPMGVVRPLTEVEMDHYREPFLNPVDREPLWRFPNELPIAGEPANIVALVEEYMDWLHQSPVPKLLFWGTPGVLIPPAEAARLAKSLPNCKAVDIGPGLNLLQEDNPDLIGSEIARWLSTLEISG

SEQ ID NO: 2082 - protein, 277 aa, Synthetic construct
MFHYVDVGPRDGTPVLFLHGNPTSSYVWRNIIPHVAPTHRCIAPDLIGMGKSDKPDLGYFFDDHVRFMDAFIEALGLEEVVLVIHDWGSALGFHWAKRNPERVKGIAFMEFIRPIPTWDEWPEFARETFQAFRTTDVGRKLIIDQNVFIERTLPMGVVRPLTEVEMDHYREPFLNPVDREPLWRFPNELPIAGEPANIVALVEEYMDWLHQSPVPKLLFWGTPGVLIPPAEAARLAKSLPNCKAVDIGPGLNLLQEDNPDLIGSEIARWLSTLEISG

SEQ ID NO: 2083 - protein, 277 aa, Synthetic construct
MFHYVDVGPRDGTPVLFLHGNPTSSYVWRNIIPHVAPTHRCIAPDLIGMGKSDKPDLGYFFDDHVRFMDAFIEALGLEEVVLVIHDWGSALGFHWAKRNPERVKGIAFMEFIRPIPTWDEWPEFARETFQAFRTTDVGRKLIIDQNVFIEKTLPMGVVRPLTEVEMDHYREPFLNPVDREPLWRFPNELPIAGEPANIVALVEEYMDWLHQSPVPKLLFWGTPGVLIPPAEAARLAKSLPNCKAVDIGPGLNLLQEDNPDLIGSEIARWLSTLEISG

SEQ ID NO: 2084 - protein, 277 aa, Synthetic construct
MFHYVDVGPRDGTPVLFLHGNPTSSYVWRNIIPHVAPTHRCIAPDLIGMGKSDKPDLGYFFDDHVRFMDAFIEALGLEEVVLVIHDWGSALGFHWAKRNPERVKGIAFMEFIRPIPTWDEWPEFARETFQAFRTTDVGRKLIIDQNVFIEQTLPMGVVRPLTEVEMDHYREPFLNPVDREPLWRFPNELPIAGEPANIVALVEEYMDWLHQSPVPKLLFWGTPGVLIPPAEAARLAKSLPNCKAVDIGPGLNLLQEDNPDLIGSEIARWLSTLEISG

SEQ ID NO: 2085 - protein, 277 aa, Synthetic construct
MFHYVDVGPRDGTPVLFLHGNPTSSYVWRNIIPHVAPTHRCIAPDLIGMGKSDKPDLGYFFDDHVRFMDAFIEALGLEEVVLVIHDWGSALGFHWAKRNPERVKGIAFMEFIRPIPTWDEWPEFARETFQAFRTTDVGRKLIIDQNVFIEATLPMGVVRPLTEVEMDHYREPFLNPVDREPLWRFPNELPIAGEPANIVALVEEYMDWLHQSPVPKLLFWGTPGVLIPPAEAARLAKSLPNCKAVDIGPGLNLLQEDNPDLIGSEIARWLSTLEISG

SEQ ID NO: 2086 - protein, 277 aa, Synthetic construct
MFHYVDVGPRDGTPVLFLHGNPTSSYVWRNIIPHVAPTHRCIAPDLIGMGKSDKPDLGYFFDDHVRFMDAFIEALGLEEVVLVIHDWGSALGFHWAKRNPERVKGIAFMEFIRPIPTWDEWPEFARETFQAFRTTDVGRKLIIDQNVFIETTLPMGVVRPLTEVEMDHYREPFLNPVDREPLWRFPNELPIAGEPANIVALVEEYMDWLHQSPVPKLLFWGTPGVLIPPAEAARLAKSLPNCKAVDIGPGLNLLQEDNPDLIGSEIARWLSTLEISG

SEQ ID NO: 2087 - protein, 277 aa, Synthetic construct
MFHYVDVGPRDGTPVLFLHGNPTSSYVWRNIIPHVAPTHRCIAPDLIGMGKSDKPDLGYFFDDHVRFMDAFIEALGLEEVVLVIHDWGSALGFHWAKRNPERVKGIAFMEFIRPIPTWDEWPEFARETFQAFRTTDVGRKLIIDQNVFIESTLPMGVVRPLTEVEMDHYREPFLNPVDREPLWRFPNELPIAGEPANIVALVEEYMDWLHQSPVPKLLFWGTPGVLIPPAEAARLAKSLPNCKAVDIGPGLNLLQEDNPDLIGSEIARWLSTLEISG

SEQ ID NO: 2088 - protein, 277 aa, Synthetic construct
MFHYVDVGPRDGTPVLFLHGNPTSSYVWRNIIPHVAPTHRCIAPDLIGMGKSDKPDLGYFFDDHVRFMDAFIEALGLEEVVLVIHDWGSALGFHWAKRNPERVKGIAFMEFIRPIPTWDEWPEFARETFQAFRTTDVGRKLIIDQNVFIEGVLPMGVVRPLTEVEMDHYREPFLNPVDREPLWRFPNELPIAGEPANIVALVEEYMDWLHQSPVPKLLFWGTPGVLIPPAEAARLAKSLPNCKAVDIGPGLNLLQEDNPDLIGSEIARWLSTLEISG

SEQ ID NO: 2089 - protein, 277 aa, Synthetic construct
MFHYVDVGPRDGTPVLFLHGNPTSSYVWRNIIPHVAPTHRCIAPDLIGMGKSDKPDLGYFFDDHVRFMDAFIEALGLEEVVLVIHDWGSALGFHWAKRNPERVKGIAFMEFIRPIPTWDEWPEFARETFQAFRTTDVGRKLIIDQNVFIEGILPMGVVRPLTEVEMDHYREPFLNPVDREPLWRFPNELPIAGEPANIVALVEEYMDWLHQSPVPKLLFWGTPGVLIPPAEAARLAKSLPNCKAVDIGPGLNLLQEDNPDLIGSEIARWLSTLEISG

SEQ ID NO: 2090 - protein, 277 aa, Synthetic construct
MFHYVDVGPRDGTPVLFLHGNPTSSYVWRNIIPHVAPTHRCIAPDLIGMGKSDKPDLGYFFDDHVRFMDAFIEALGLEEVVLVIHDWGSALGFHWAKRNPERVKGIAFMEFIRPIPTWDEWPEFARETFQAFRTTDVGRKLIIDQNVFIEGALPMGVVRPLTEVEMDHYREPFLNPVDREPLWRFPNELPIAGEPANIVALVEEYMDWLHQSPVPKLLFWGTPGVLIPPAEAARLAKSLPNCKAVDIGPGLNLLQEDNPDLIGSEIARWLSTLEISG

SEQ ID NO: 2091 - protein, 277 aa, Synthetic construct
MFHYVDVGPRDGTPVLFLHGNPTSSYVWRNIIPHVAPTHRCIAPDLIGMGKSDKPDLGYFFDDHVRFMDAFIEALGLEEVVLVIHDWGSALGFHWAKRNPERVKGIAFMEFIRPIPTWDEWPEFARETFQAFRTTDVGRKLIIDQNVFIEGLLPMGVVRPLTEVEMDHYREPFLNPVDREPLWRFPNELPIAGEPANIVALVEEYMDWLHQSPVPKLLFWGTPGVLIPPAEAARLAKSLPNCKAVDIGPGLNLLQEDNPDLIGSEIARWLSTLEISG

SEQ ID NO: 2092 - protein, 277 aa, Synthetic construct
MFHYVDVGPRDGTPVLFLHGNPTSSYVWRNIIPHVAPTHRCIAPDLIGMGKSDKPDLGYFFDDHVRFMDAFIEALGLEEVVLVIHDWGSALGFHWAKRNPERVKGIAFMEFIRPIPTWDEWPEFARETFQAFRTTDVGRKLIIDQNVFIEGMLPMGVVRPLTEVEMDHYREPFLNPVDREPLWRFPNELPIAGEPANIVALVEEYMDWLHQSPVPKLLFWGTPGVLIPPAEAARLAKSLPNCKAVDIGPGLNLLQEDNPDLIGSEIARWLSTLEISG

SEQ ID NO: 2093 - protein, 277 aa, Synthetic construct
MFHYVDVGPRDGTPVLFLHGNPTSSYVWRNIIPHVAPTHRCIAPDLIGMGKSDKPDLGYFFDDHVRFMDAFIEALGLEEVVLVIHDWGSALGFHWAKRNPERVKGIAFMEFIRPIPTWDEWPEFARETFQAFRTTDVGRKLIIDQNVFIEGFLPMGVVRPLTEVEMDHYREPFLNPVDREPLWRFPNELPIAGEPANIVALVEEYMDWLHQSPVPKLLFWGTPGVLIPPAEAARLAKSLPNCKAVDIGPGLNLLQEDNPDLIGSEIARWLSTLEISG

SEQ ID NO: 2094 - protein, 277 aa, Synthetic construct
MFHYVDVGPRDGTPVLFLHGNPTSSYVWRNIIPHVAPTHRCIAPDLIGMGKSDKPDLGYFFDDHVRFMDAFIEALGLEEVVLVIHDWGSALGFHWAKRNPERVKGIAFMEFIRPIPTWDEWPEFARETFQAFRTTDVGRKLIIDQNVFIEGTIPMGVVRPLTEVEMDHYREPFLNPVDREPLWRFPNELPIAGEPANIVALVEEYMDWLHQSPVPKLLFWGTPGVLIPPAEAARLAKSLPNCKAVDIGPGLNLLQEDNPDLIGSEIARWLSTLEISG

SEQ ID NO: 2095 - protein, 277 aa, Synthetic construct
MFHYVDVGPRDGTPVLFLHGNPTSSYVWRNIIPHVAPTHRCIAPDLIGMGKSDKPDLGYFFDDHVRFMDAFIEALGLEEVVLVIHDWGSALGFHWAKRNPERVKGIAFMEFIRPIPTWDEWPEFARETFQAFRTTDVGRKLIIDQNVFIEGTMPMGVVRPLTEVEMDHYREPFLNPVDREPLWRFPNELPIAGEPANIVALVEEYMDWLHQSPVPKLLFWGTPGVLIPPAEAARLAKSLPNCKAVDIGPGLNLLQEDNPDLIGSEIARWLSTLEISG

SEQ ID NO: 2096 - protein, 277 aa, Synthetic construct
MFHYVDVGPRDGTPVLFLHGNPTSSYVWRNIIPHVAPTHRCIAPDLIGMGKSDKPDLGYFFDDHVRFMDAFIEALGLEEVVLVIHDWGSALGFHWAKRNPERVKGIAFMEFIRPIPTWDEWPEFARETFQAFRTTDVGRKLIIDQNVFIEGTFPMGVVRPLTEVEMDHYREPFLNPVDREPLWRFPNELPIAGEPANIVALVEEYMDWLHQSPVPKLLFWGTPGVLIPPAEAARLAKSLPNCKAVDIGPGLNLLQEDNPDLIGSEIARWLSTLEISG

SEQ ID NO: 2097 - protein, 277 aa, Synthetic construct
MFHYVDVGPRDGTPVLFLHGNPTSSYVWRNIIPHVAPTHRCIAPDLIGMGKSDKPDLGYFFDDHVRFMDAFIEALGLEEVVLVIHDWGSALGFHWAKRNPERVKGIAFMEFIRPIPTWDEWPEFARETFQAFRTTDVGRKLIIDQNVFIEGTVPMGVVRPLTEVEMDHYREPFLNPVDREPLWRFPNELPIAGEPANIVALVEEYMDWLHQSPVPKLLFWGTPGVLIPPAEAARLAKSLPNCKAVDIGPGLNLLQEDNPDLIGSEIARWLSTLEISG

SEQ ID NO: 2098 - protein, 277 aa, Synthetic construct
MFHYVDVGPRDGTPVLFLHGNPTSSYVWRNIIPHVAPTHRCIAPDLIGMGKSDKPDLGYFFDDHVRFMDAFIEALGLEEVVLVIHDWGSALGFHWAKRNPERVKGIAFMEFIRPIPTWDEWPEFARETFQAFRTTDVGRKLIIDQNVFIEGTAPMGVVRPLTEVEMDHYREPFLNPVDREPLWRFPNELPIAGEPANIVALVEEYMDWLHQSPVPKLLFWGTPGVLIPPAEAARLAKSLPNCKAVDIGPGLNLLQEDNPDLIGSEIARWLSTLEISG

SEQ ID NO: 2099 - protein, 277 aa, Synthetic construct
MFHYVDVGPRDGTPVLFLHGNPTSSYVWRNIIPHVAPTHRCIAPDLIGMGKSDKPDLGYFFDDHVRFMDAFIEALGLEEVVLVIHDWGSALGFHWAKRNPERVKGIAFMEFIRPIPTWDEWPEFARETFQAFRTTDVGRKLIIDQNVFIEGTYPMGVVRPLTEVEMDHYREPFLNPVDREPLWRFPNELPIAGEPANIVALVEEYMDWLHQSPVPKLLFWGTPGVLIPPAEAARLAKSLPNCKAVDIGPGLNLLQEDNPDLIGSEIARWLSTLEISG

SEQ ID NO: 2100 - protein, 277 aa, Synthetic construct
MFHYVDVGPRDGTPVLFLHGNPTSSYVWRNIIPHVAPTHRCIAPDLIGMGKSDKPDLGYFFDDHVRFMDAFIEALGLEEVVLVIHDWGSALGFHWAKRNPERVKGIAFMEFIRPIPTWDEWPEFARETFQAFRTTDVGRKLIIDQNVFIEGTLRMGVVRPLTEVEMDHYREPFLNPVDREPLWRFPNELPIAGEPANIVALVEEYMDWLHQSPVPKLLFWGTPGVLIPPAEAARLAKSLPNCKAVDIGPGLNLLQEDNPDLIGSEIARWLSTLEISG

SEQ ID NO: 2101 - protein, 277 aa, Synthetic construct
MFHYVDVGPRDGTPVLFLHGNPTSSYVWRNIIPHVAPTHRCIAPDLIGMGKSDKPDLGYFFDDHVRFMDAFIEALGLEEVVLVIHDWGSALGFHWAKRNPERVKGIAFMEFIRPIPTWDEWPEFARETFQAFRTTDVGRKLIIDQNVFIEGTLAMGVVRPLTEVEMDHYREPFLNPVDREPLWRFPNELPIAGEPANIVALVEEYMDWLHQSPVPKLLFWGTPGVLIPPAEAARLAKSLPNCKAVDIGPGLNLLQEDNPDLIGSEIARWLSTLEISG

SEQ ID NO: 2102 - protein, 277 aa, Synthetic construct
MFHYVDVGPRDGTPVLFLHGNPTSSYVWRNIIPHVAPTHRCIAPDLIGMGKSDKPDLGYFFDDHVRFMDAFIEALGLEEVVLVIHDWGSALGFHWAKRNPERVKGIAFMEFIRPIPTWDEWPEFARETFQAFRTTDVGRKLIIDQNVFIEGTLKMGVVRPLTEVEMDHYREPFLNPVDREPLWRFPNELPIAGEPANIVALVEEYMDWLHQSPVPKLLFWGTPGVLIPPAEAARLAKSLPNCKAVDIGPGLNLLQEDNPDLIGSEIARWLSTLEISG

SEQ ID NO: 2103 - protein, 277 aa, Synthetic construct
MFHYVDVGPRDGTPVLFLHGNPTSSYVWRNIIPHVAPTHRCIAPDLIGMGKSDKPDLGYFFDDHVRFMDAFIEALGLEEVVLVIHDWGSALGFHWAKRNPERVKGIAFMEFIRPIPTWDEWPEFARETFQAFRTTDVGRKLIIDQNVFIEGTLSMGVVRPLTEVEMDHYREPFLNPVDREPLWRFPNELPIAGEPANIVALVEEYMDWLHQSPVPKLLFWGTPGVLIPPAEAARLAKSLPNCKAVDIGPGLNLLQEDNPDLIGSEIARWLSTLEISG

SEQ ID NO: 2104 - protein, 277 aa, Synthetic construct
MFHYVDVGPRDGTPVLFLHGNPTSSYVWRNIIPHVAPTHRCIAPDLIGMGKSDKPDLGYFFDDHVRFMDAFIEALGLEEVVLVIHDWGSALGFHWAKRNPERVKGIAFMEFIRPIPTWDEWPEFARETFQAFRTTDVGRKLIIDQNVFIEGTLTMGVVRPLTEVEMDHYREPFLNPVDREPLWRFPNELPIAGEPANIVALVEEYMDWLHQSPVPKLLFWGTPGVLIPPAEAARLAKSLPNCKAVDIGPGLNLLQEDNPDLIGSEIARWLSTLEISG

SEQ ID NO: 2105 - protein, 277 aa, Synthetic construct
MFHYVDVGPRDGTPVLFLHGNPTSSYVWRNIIPHVAPTHRCIAPDLIGMGKSDKPDLGYFFDDHVRFMDAFIEALGLEEVVLVIHDWGSALGFHWAKRNPERVKGIAFMEFIRPIPTWDEWPEFARETFQAFRTTDVGRKLIIDQNVFIEGTLQMGVVRPLTEVEMDHYREPFLNPVDREPLWRFPNELPIAGEPANIVALVEEYMDWLHQSPVPKLLFWGTPGVLIPPAEAARLAKSLPNCKAVDIGPGLNLLQEDNPDLIGSEIARWLSTLEISG

SEQ ID NO: 2106 - protein, 277 aa, Synthetic construct
MFHYVDVGPRDGTPVLFLHGNPTSSYVWRNIIPHVAPTHRCIAPDLIGMGKSDKPDLGYFFDDHVRFMDAFIEALGLEEVVLVIHDWGSALGFHWAKRNPERVKGIAFMEFIRPIPTWDEWPEFARETFQAFRTTDVGRKLIIDQNVFIEGTLPGGVVRPLTEVEMDHYREPFLNPVDREPLWRFPNELPIAGEPANIVALVEEYMDWLHQSPVPKLLFWGTPGVLIPPAEAARLAKSLPNCKAVDIGPGLNLLQEDNPDLIGSEIARWLSTLEISG

SEQ ID NO: 2107 - protein, 277 aa, Synthetic construct
MFHYVDVGPRDGTPVLFLHGNPTSSYVWRNIIPHVAPTHRCIAPDLIGMGKSDKPDLGYFFDDHVRFMDAFIEALGLEEVVLVIHDWGSALGFHWAKRNPERVKGIAFMEFIRPIPTWDEWPEFARETFQAFRTTDVGRKLIIDQNVFIEGTLPAGVVRPLTEVEMDHYREPFLNPVDREPLWRFPNELPIAGEPANIVALVEEYMDWLHQSPVPKLLFWGTPGVLIPPAEAARLAKSLPNCKAVDIGPGLNLLQEDNPDLIGSEIARWLSTLEISG

SEQ ID NO: 2108 - protein, 277 aa, Synthetic construct
MFHYVDVGPRDGTPVLFLHGNPTSSYVWRNIIPHVAPTHRCIAPDLIGMGKSDKPDLGYFFDDHVRFMDAFIEALGLEEVVLVIHDWGSALGFHWAKRNPERVKGIAFMEFIRPIPTWDEWPEFARETFQAFRTTDVGRKLIIDQNVFIEGTLPSGVVRPLTEVEMDHYREPFLNPVDREPLWRFPNELPIAGEPANIVALVEEYMDWLHQSPVPKLLFWGTPGVLIPPAEAARLAKSLPNCKAVDIGPGLNLLQEDNPDLIGSEIARWLSTLEISG

SEQ ID NO: 2109 - protein, 277 aa, Synthetic construct
MFHYVDVGPRDGTPVLFLHGNPTSSYVWRNIIPHVAPTHRCIAPDLIGMGKSDKPDLGYFFDDHVRFMDAFIEALGLEEVVLVIHDWGSALGFHWAKRNPERVKGIAFMEFIRPIPTWDEWPEFARETFQAFRTTDVGRKLIIDQNVFIEGTLPRGVVRPLTEVEMDHYREPFLNPVDREPLWRFPNELPIAGEPANIVALVEEYMDWLHQSPVPKLLFWGTPGVLIPPAEAARLAKSLPNCKAVDIGPGLNLLQEDNPDLIGSEIARWLSTLEISG

SEQ ID NO: 2110 - protein, 277 aa, Synthetic construct
MFHYVDVGPRDGTPVLFLHGNPTSSYVWRNIIPHVAPTHRCIAPDLIGMGKSDKPDLGYFFDDHVRFMDAFIEALGLEEVVLVIHDWGSALGFHWAKRNPERVKGIAFMEFIRPIPTWDEWPEFARETFQAFRTTDVGRKLIIDQNVFIEGTLPLGVVRPLTEVEMDHYREPFLNPVDREPLWRFPNELPIAGEPANIVALVEEYMDWLHQSPVPKLLFWGTPGVLIPPAEAARLAKSLPNCKAVDIGPGLNLLQEDNPDLIGSEIARWLSTLEISG

SEQ ID NO: 2111 - protein, 277 aa, Synthetic construct
MFHYVDVGPRDGTPVLFLHGNPTSSYVWRNIIPHVAPTHRCIAPDLIGMGKSDKPDLGYFFDDHVRFMDAFIEALGLEEVVLVIHDWGSALGFHWAKRNPERVKGIAFMEFIRPIPTWDEWPEFARETFQAFRTTDVGRKLIIDQNVFIEGTLPKGVVRPLTEVEMDHYREPFLNPVDREPLWRFPNELPIAGEPANIVALVEEYMDWLHQSPVPKLLFWGTPGVLIPPAEAARLAKSLPNCKAVDIGPGLNLLQEDNPDLIGSEIARWLSTLEISG

SEQ ID NO: 2112 - protein, 277 aa, Synthetic construct
MFHYVDVGPRDGTPVLFLHGNPTSSYVWRNIIPHVAPTHRCIAPDLIGMGKSDKPDLGYFFDDHVRFMDAFIEALGLEEVVLVIHDWGSALGFHWAKRNPERVKGIAFMEFIRPIPTWDEWPEFARETFQAFRTTDVGRKLIIDQNVFIEGTLPMAVVRPLTEVEMDHYREPFLNPVDREPLWRFPNELPIAGEPANIVALVEEYMDWLHQSPVPKLLFWGTPGVLIPPAEAARLAKSLPNCKAVDIGPGLNLLQEDNPDLIGSEIARWLSTLEISG

SEQ ID NO: 2113 - protein, 277 aa, Synthetic construct
MFHYVDVGPRDGTPVLFLHGNPTSSYVWRNIIPHVAPTHRCIAPDLIGMGKSDKPDLGYFFDDHVRFMDAFIEALGLEEVVLVIHDWGSALGFHWAKRNPERVKGIAFMEFIRPIPTWDEWPEFARETFQAFRTTDVGRKLIIDQNVFIEGTLPMTVVRPLTEVEMDHYREPFLNPVDREPLWRFPNELPIAGEPANIVALVEEYMDWLHQSPVPKLLFWGTPGVLIPPAEAARLAKSLPNCKAVDIGPGLNLLQEDNPDLIGSEIARWLSTLEISG

SEQ ID NO: 2114 - protein, 277 aa, Synthetic construct
MFHYVDVGPRDGTPVLFLHGNPTSSYVWRNIIPHVAPTHRCIAPDLIGMGKSDKPDLGYFFDDHVRFMDAFIEALGLEEVVLVIHDWGSALGFHWAKRNPERVKGIAFMEFIRPIPTWDEWPEFARETFQAFRTTDVGRKLIIDQNVFIEGTLPMMVVRPLTEVEMDHYREPFLNPVDREPLWRFPNELPIAGEPANIVALVEEYMDWLHQSPVPKLLFWGTPGVLIPPAEAARLAKSLPNCKAVDIGPGLNLLQEDNPDLIGSEIARWLSTLEISG

SEQ ID NO: 2115 - protein, 277 aa, Synthetic construct
MFHYVDVGPRDGTPVLFLHGNPTSSYVWRNIIPHVAPTHRCIAPDLIGMGKSDKPDLGYFFDDHVRFMDAFIEALGLEEVVLVIHDWGSALGFHWAKRNPERVKGIAFMEFIRPIPTWDEWPEFARETFQAFRTTDVGRKLIIDQNVFIEGTLPMLVVRPLTEVEMDHYREPFLNPVDREPLWRFPNELPIAGEPANIVALVEEYMDWLHQSPVPKLLFWGTPGVLIPPAEAARLAKSLPNCKAVDIGPGLNLLQEDNPDLIGSEIARWLSTLEISG

SEQ ID NO: 2116 - protein, 277 aa, Synthetic construct
MFHYVDVGPRDGTPVLFLHGNPTSSYVWRNIIPHVAPTHRCIAPDLIGMGKSDKPDLGYFFDDHVRFMDAFIEALGLEEVVLVIHDWGSALGFHWAKRNPERVKGIAFMEFIRPIPTWDEWPEFARETFQAFRTTDVGRKLIIDQNVFIEGTLPMNVVRPLTEVEMDHYREPFLNPVDREPLWRFPNELPIAGEPANIVALVEEYMDWLHQSPVPKLLFWGTPGVLIPPAEAARLAKSLPNCKAVDIGPGLNLLQEDNPDLIGSEIARWLSTLEISG

SEQ ID NO: 2117 - protein, 277 aa, Synthetic construct
MFHYVDVGPRDGTPVLFLHGNPTSSYVWRNIIPHVAPTHRCIAPDLIGMGKSDKPDLGYFFDDHVRFMDAFIEALGLEEVVLVIHDWGSALGFHWAKRNPERVKGIAFMEFIRPIPTWDEWPEFARETFQAFRTTDVGRKLIIDQNVFIEGTLPMGIVRPLTEVEMDHYREPFLNPVDREPLWRFPNELPIAGEPANIVALVEEYMDWLHQSPVPKLLFWGTPGVLIPPAEAARLAKSLPNCKAVDIGPGLNLLQEDNPDLIGSEIARWLSTLEISG

SEQ ID NO: 2118 - protein, 277 aa, Synthetic construct
MFHYVDVGPRDGTPVLFLHGNPTSSYVWRNIIPHVAPTHRCIAPDLIGMGKSDKPDLGYFFDDHVRFMDAFIEALGLEEVVLVIHDWGSALGFHWAKRNPERVKGIAFMEFIRPIPTWDEWPEFARETFQAFRTTDVGRKLIIDQNVFIEGTLPMGLVRPLTEVEMDHYREPFLNPVDREPLWRFPNELPIAGEPANIVALVEEYMDWLHQSPVPKLLFWGTPGVLIPPAEAARLAKSLPNCKAVDIGPGLNLLQEDNPDLIGSEIARWLSTLEISG

SEQ ID NO: 2119 - protein, 277 aa, Synthetic construct
MFHYVDVGPRDGTPVLFLHGNPTSSYVWRNIIPHVAPTHRCIAPDLIGMGKSDKPDLGYFFDDHVRFMDAFIEALGLEEVVLVIHDWGSALGFHWAKRNPERVKGIAFMEFIRPIPTWDEWPEFARETFQAFRTTDVGRKLIIDQNVFIEGTLPMGAVRPLTEVEMDHYREPFLNPVDREPLWRFPNELPIAGEPANIVALVEEYMDWLHQSPVPKLLFWGTPGVLIPPAEAARLAKSLPNCKAVDIGPGLNLLQEDNPDLIGSEIARWLSTLEISG

SEQ ID NO: 2120 - protein, 277 aa, Synthetic construct
MFHYVDVGPRDGTPVLFLHGNPTSSYVWRNIIPHVAPTHRCIAPDLIGMGKSDKPDLGYFFDDHVRFMDAFIEALGLEEVVLVIHDWGSALGFHWAKRNPERVKGIAFMEFIRPIPTWDEWPEFARETFQAFRTTDVGRKLIIDQNVFIEGTLPMGTVRPLTEVEMDHYREPFLNPVDREPLWRFPNELPIAGEPANIVALVEEYMDWLHQSPVPKLLFWGTPGVLIPPAEAARLAKSLPNCKAVDIGPGLNLLQEDNPDLIGSEIARWLSTLEISG

SEQ ID NO: 2121 - protein, 277 aa, Synthetic construct
MFHYVDVGPRDGTPVLFLHGNPTSSYVWRNIIPHVAPTHRCIAPDLIGMGKSDKPDLGYFFDDHVRFMDAFIEALGLEEVVLVIHDWGSALGFHWAKRNPERVKGIAFMEFIRPIPTWDEWPEFARETFQAFRTTDVGRKLIIDQNVFIEGTLPMGMVRPLTEVEMDHYREPFLNPVDREPLWRFPNELPIAGEPANIVALVEEYMDWLHQSPVPKLLFWGTPGVLIPPAEAARLAKSLPNCKAVDIGPGLNLLQEDNPDLIGSEIARWLSTLEISG

SEQ ID NO: 2122 - protein, 277 aa, Synthetic construct
MFHYVDVGPRDGTPVLFLHGNPTSSYVWRNIIPHVAPTHRCIAPDLIGMGKSDKPDLGYFFDDHVRFMDAFIEALGLEEVVLVIHDWGSALGFHWAKRNPERVKGIAFMEFIRPIPTWDEWPEFARETFQAFRTTDVGRKLIIDQNVFIEGTLPMGSVRPLTEVEMDHYREPFLNPVDREPLWRFPNELPIAGEPANIVALVEEYMDWLHQSPVPKLLFWGTPGVLIPPAEAARLAKSLPNCKAVDIGPGLNLLQEDNPDLIGSEIARWLSTLEISG

SEQ ID NO: 2123 - protein, 277 aa, Synthetic construct
MFHYVDVGPRDGTPVLFLHGNPTSSYVWRNIIPHVAPTHRCIAPDLIGMGKSDKPDLGYFFDDHVRFMDAFIEALGLEEVVLVIHDWGSALGFHWAKRNPERVKGIAFMEFIRPIPTWDEWPEFARETFQAFRTTDVGRKLIIDQNVFIEGTLPMGVLRPLTEVEMDHYREPFLNPVDREPLWRFPNELPIAGEPANIVALVEEYMDWLHQSPVPKLLFWGTPGVLIPPAEAARLAKSLPNCKAVDIGPGLNLLQEDNPDLIGSEIARWLSTLEISG

SEQ ID NO: 2124 - protein, 277 aa, Synthetic construct
MFHYVDVGPRDGTPVLFLHGNPTSSYVWRNIIPHVAPTHRCIAPDLIGMGKSDKPDLGYFFDDHVRFMDAFIEALGLEEVVLVIHDWGSALGFHWAKRNPERVKGIAFMEFIRPIPTWDEWPEFARETFQAFRTTDVGRKLIIDQNVFIEGTLPMGVIRPLTEVEMDHYREPFLNPVDREPLWRFPNELPIAGEPANIVALVEEYMDWLHQSPVPKLLFWGTPGVLIPPAEAARLAKSLPNCKAVDIGPGLNLLQEDNPDLIGSEIARWLSTLEISG

SEQ ID NO: 2125 - protein, 277 aa, Synthetic construct
MFHYVDVGPRDGTPVLFLHGNPTSSYVWRNIIPHVAPTHRCIAPDLIGMGKSDKPDLGYFFDDHVRFMDAFIEALGLEEVVLVIHDWGSALGFHWAKRNPERVKGIAFMEFIRPIPTWDEWPEFARETFQAFRTTDVGRKLIIDQNVFIEGTLPMGVMRPLTEVEMDHYREPFLNPVDREPLWRFPNELPIAGEPANIVALVEEYMDWLHQSPVPKLLFWGTPGVLIPPAEAARLAKSLPNCKAVDIGPGLNLLQEDNPDLIGSEIARWLSTLEISG

SEQ ID NO: 2126 - protein, 277 aa, Synthetic construct
MFHYVDVGPRDGTPVLFLHGNPTSSYVWRNIIPHVAPTHRCIAPDLIGMGKSDKPDLGYFFDDHVRFMDAFIEALGLEEVVLVIHDWGSALGFHWAKRNPERVKGIAFMEFIRPIPTWDEWPEFARETFQAFRTTDVGRKLIIDQNVFIEGTLPMGVARPLTEVEMDHYREPFLNPVDREPLWRFPNELPIAGEPANIVALVEEYMDWLHQSPVPKLLFWGTPGVLIPPAEAARLAKSLPNCKAVDIGPGLNLLQEDNPDLIGSEIARWLSTLEISG

SEQ ID NO: 2127 - protein, 277 aa, Synthetic construct
MFHYVDVGPRDGTPVLFLHGNPTSSYVWRNIIPHVAPTHRCIAPDLIGMGKSDKPDLGYFFDDHVRFMDAFIEALGLEEVVLVIHDWGSALGFHWAKRNPERVKGIAFMEFIRPIPTWDEWPEFARETFQAFRTTDVGRKLIIDQNVFIEGTLPMGVTRPLTEVEMDHYREPFLNPVDREPLWRFPNELPIAGEPANIVALVEEYMDWLHQSPVPKLLFWGTPGVLIPPAEAARLAKSLPNCKAVDIGPGLNLLQEDNPDLIGSEIARWLSTLEISG

SEQ ID NO: 2128 - protein, 277 aa, Synthetic construct
MFHYVDVGPRDGTPVLFLHGNPTSSYVWRNIIPHVAPTHRCIAPDLIGMGKSDKPDLGYFFDDHVRFMDAFIEALGLEEVVLVIHDWGSALGFHWAKRNPERVKGIAFMEFIRPIPTWDEWPEFARETFQAFRTTDVGRKLIIDQNVFIEGTLPMGVRRPLTEVEMDHYREPFLNPVDREPLWRFPNELPIAGEPANIVALVEEYMDWLHQSPVPKLLFWGTPGVLIPPAEAARLAKSLPNCKAVDIGPGLNLLQEDNPDLIGSEIARWLSTLEISG

SEQ ID NO: 2129 - protein, 277 aa, Synthetic construct
MFHYVDVGPRDGTPVLFLHGNPTSSYVWRNIIPHVAPTHRCIAPDLIGMGKSDKPDLGYFFDDHVRFMDAFIEALGLEEVVLVIHDWGSALGFHWAKRNPERVKGIAFMEFIRPIPTWDEWPEFARETFQAFRTTDVGRKLIIDQNVFIEGTLPMGVVKPLTEVEMDHYREPFLNPVDREPLWRFPNELPIAGEPANIVALVEEYMDWLHQSPVPKLLFWGTPGVLIPPAEAARLAKSLPNCKAVDIGPGLNLLQEDNPDLIGSEIARWLSTLEISG

SEQ ID NO: 2130 - protein, 277 aa, Synthetic construct
MFHYVDVGPRDGTPVLFLHGNPTSSYVWRNIIPHVAPTHRCIAPDLIGMGKSDKPDLGYFFDDHVRFMDAFIEALGLEEVVLVIHDWGSALGFHWAKRNPERVKGIAFMEFIRPIPTWDEWPEFARETFQAFRTTDVGRKLIIDQNVFIEGTLPMGVVHPLTEVEMDHYREPFLNPVDREPLWRFPNELPIAGEPANIVALVEEYMDWLHQSPVPKLLFWGTPGVLIPPAEAARLAKSLPNCKAVDIGPGLNLLQEDNPDLIGSEIARWLSTLEISG

SEQ ID NO: 2131 - protein, 277 aa, Synthetic construct
MFHYVDVGPRDGTPVLFLHGNPTSSYVWRNIIPHVAPTHRCIAPDLIGMGKSDKPDLGYFFDDHVRFMDAFIEALGLEEVVLVIHDWGSALGFHWAKRNPERVKGIAFMEFIRPIPTWDEWPEFARETFQAFRTTDVGRKLIIDQNVFIEGTLPMGVVSPLTEVEMDHYREPFLNPVDREPLWRFPNELPIAGEPANIVALVEEYMDWLHQSPVPKLLFWGTPGVLIPPAEAARLAKSLPNCKAVDIGPGLNLLQEDNPDLIGSEIARWLSTLEISG

SEQ ID NO: 2132 - protein, 277 aa, Synthetic construct
MFHYVDVGPRDGTPVLFLHGNPTSSYVWRNIIPHVAPTHRCIAPDLIGMGKSDKPDLGYFFDDHVRFMDAFIEALGLEEVVLVIHDWGSALGFHWAKRNPERVKGIAFMEFIRPIPTWDEWPEFARETFQAFRTTDVGRKLIIDQNVFIEGTLPMGVVNPLTEVEMDHYREPFLNPVDREPLWRFPNELPIAGEPANIVALVEEYMDWLHQSPVPKLLFWGTPGVLIPPAEAARLAKSLPNCKAVDIGPGLNLLQEDNPDLIGSEIARWLSTLEISG

SEQ ID NO: 2133 - protein, 277 aa, Synthetic construct
MFHYVDVGPRDGTPVLFLHGNPTSSYVWRNIIPHVAPTHRCIAPDLIGMGKSDKPDLGYFFDDHVRFMDAFIEALGLEEVVLVIHDWGSALGFHWAKRNPERVKGIAFMEFIRPIPTWDEWPEFARETFQAFRTTDVGRKLIIDQNVFIEGTLPMGVVQPLTEVEMDHYREPFLNPVDREPLWRFPNELPIAGEPANIVALVEEYMDWLHQSPVPKLLFWGTPGVLIPPAEAARLAKSLPNCKAVDIGPGLNLLQEDNPDLIGSEIARWLSTLEISG

SEQ ID NO: 2134 - protein, 277 aa, Synthetic construct
MFHYVDVGPRDGTPVLFLHGNPTSSYVWRNIIPHVAPTHRCIAPDLIGMGKSDKPDLGYFFDDHVRFMDAFIEALGLEEVVLVIHDWGSALGFHWAKRNPERVKGIAFMEFIRPIPTWDEWPEFARETFQAFRTTDVGRKLIIDQNVFIEGTLPMGVVTPLTEVEMDHYREPFLNPVDREPLWRFPNELPIAGEPANIVALVEEYMDWLHQSPVPKLLFWGTPGVLIPPAEAARLAKSLPNCKAVDIGPGLNLLQEDNPDLIGSEIARWLSTLEISG

SEQ ID NO: 2135 - protein, 277 aa, Synthetic construct
MFHYVDVGPRDGTPVLFLHGNPTSSYVWRNIIPHVAPTHRCIAPDLIGMGKSDKPDLGYFFDDHVRFMDAFIEALGLEEVVLVIHDWGSALGFHWAKRNPERVKGIAFMEFIRPIPTWDEWPEFARETFQAFRTTDVGRKLIIDQNVFIEGTLPMGVVRDLTEVEMDHYREPFLNPVDREPLWRFPNELPIAGEPANIVALVEEYMDWLHQSPVPKLLFWGTPGVLIPPAEAARLAKSLPNCKAVDIGPGLNLLQEDNPDLIGSEIARWLSTLEISG

SEQ ID NO: 2136 - protein, 277 aa, Synthetic construct
MFHYVDVGPRDGTPVLFLHGNPTSSYVWRNIIPHVAPTHRCIAPDLIGMGKSDKPDLGYFFDDHVRFMDAFIEALGLEEVVLVIHDWGSALGFHWAKRNPERVKGIAFMEFIRPIPTWDEWPEFARETFQAFRTTDVGRKLIIDQNVFIEGTLPMGVVRELTEVEMDHYREPFLNPVDREPLWRFPNELPIAGEPANIVALVEEYMDWLHQSPVPKLLFWGTPGVLIPPAEAARLAKSLPNCKAVDIGPGLNLLQEDNPDLIGSEIARWLSTLEISG

SEQ ID NO: 2137 - protein, 277 aa, Synthetic construct
MFHYVDVGPRDGTPVLFLHGNPTSSYVWRNIIPHVAPTHRCIAPDLIGMGKSDKPDLGYFFDDHVRFMDAFIEALGLEEVVLVIHDWGSALGFHWAKRNPERVKGIAFMEFIRPIPTWDEWPEFARETFQAFRTTDVGRKLIIDQNVFIEGTLPMGVVRNLTEVEMDHYREPFLNPVDREPLWRFPNELPIAGEPANIVALVEEYMDWLHQSPVPKLLFWGTPGVLIPPAEAARLAKSLPNCKAVDIGPGLNLLQEDNPDLIGSEIARWLSTLEISG

SEQ ID NO: 2138 - protein, 277 aa, Synthetic construct
MFHYVDVGPRDGTPVLFLHGNPTSSYVWRNIIPHVAPTHRCIAPDLIGMGKSDKPDLGYFFDDHVRFMDAFIEALGLEEVVLVIHDWGSALGFHWAKRNPERVKGIAFMEFIRPIPTWDEWPEFARETFQAFRTTDVGRKLIIDQNVFIEGTLPMGVVRGLTEVEMDHYREPFLNPVDREPLWRFPNELPIAGEPANIVALVEEYMDWLHQSPVPKLLFWGTPGVLIPPAEAARLAKSLPNCKAVDIGPGLNLLQEDNPDLIGSEIARWLSTLEISG

SEQ ID NO: 2139 - protein, 277 aa, Synthetic construct
MFHYVDVGPRDGTPVLFLHGNPTSSYVWRNIIPHVAPTHRCIAPDLIGMGKSDKPDLGYFFDDHVRFMDAFIEALGLEEVVLVIHDWGSALGFHWAKRNPERVKGIAFMEFIRPIPTWDEWPEFARETFQAFRTTDVGRKLIIDQNVFIEGTLPMGVVRSLTEVEMDHYREPFLNPVDREPLWRFPNELPIAGEPANIVALVEEYMDWLHQSPVPKLLFWGTPGVLIPPAEAARLAKSLPNCKAVDIGPGLNLLQEDNPDLIGSEIARWLSTLEISG

SEQ ID NO: 2140 - protein, 277 aa, Synthetic construct
MFHYVDVGPRDGTPVLFLHGNPTSSYVWRNIIPHVAPTHRCIAPDLIGMGKSDKPDLGYFFDDHVRFMDAFIEALGLEEVVLVIHDWGSALGFHWAKRNPERVKGIAFMEFIRPIPTWDEWPEFARETFQAFRTTDVGRKLIIDQNVFIEGTLPMGVVRPITEVEMDHYREPFLNPVDREPLWRFPNELPIAGEPANIVALVEEYMDWLHQSPVPKLLFWGTPGVLIPPAEAARLAKSLPNCKAVDIGPGLNLLQEDNPDLIGSEIARWLSTLEISG

SEQ ID NO: 2141 - protein, 277 aa, Synthetic construct
MFHYVDVGPRDGTPVLFLHGNPTSSYVWRNIIPHVAPTHRCIAPDLIGMGKSDKPDLGYFFDDHVRFMDAFIEALGLEEVVLVIHDWGSALGFHWAKRNPERVKGIAFMEFIRPIPTWDEWPEFARETFQAFRTTDVGRKLIIDQNVFIEGTLPMGVVRPFTEVEMDHYREPFLNPVDREPLWRFPNELPIAGEPANIVALVEEYMDWLHQSPVPKLLFWGTPGVLIPPAEAARLAKSLPNCKAVDIGPGLNLLQEDNPDLIGSEIARWLSTLEISG

SEQ ID NO: 2142 - protein, 277 aa, Synthetic construct
MFHYVDVGPRDGTPVLFLHGNPTSSYVWRNIIPHVAPTHRCIAPDLIGMGKSDKPDLGYFFDDHVRFMDAFIEALGLEEVVLVIHDWGSALGFHWAKRNPERVKGIAFMEFIRPIPTWDEWPEFARETFQAFRTTDVGRKLIIDQNVFIEGTLPMGVVRPVTEVEMDHYREPFLNPVDREPLWRFPNELPIAGEPANIVALVEEYMDWLHQSPVPKLLFWGTPGVLIPPAEAARLAKSLPNCKAVDIGPGLNLLQEDNPDLIGSEIARWLSTLEISG

SEQ ID NO: 2143 - protein, 277 aa, Synthetic construct
MFHYVDVGPRDGTPVLFLHGNPTSSYVWRNIIPHVAPTHRCIAPDLIGMGKSDKPDLGYFFDDHVRFMDAFIEALGLEEVVLVIHDWGSALGFHWAKRNPERVKGIAFMEFIRPIPTWDEWPEFARETFQAFRTTDVGRKLIIDQNVFIEGTLPMGVVRPPTEVEMDHYREPFLNPVDREPLWRFPNELPIAGEPANIVALVEEYMDWLHQSPVPKLLFWGTPGVLIPPAEAARLAKSLPNCKAVDIGPGLNLLQEDNPDLIGSEIARWLSTLEISG

SEQ ID NO: 2144 - protein, 277 aa, Synthetic construct
MFHYVDVGPRDGTPVLFLHGNPTSSYVWRNIIPHVAPTHRCIAPDLIGMGKSDKPDLGYFFDDHVRFMDAFIEALGLEEVVLVIHDWGSALGFHWAKRNPERVKGIAFMEFIRPIPTWDEWPEFARETFQAFRTTDVGRKLIIDQNVFIEGTLPMGVVRPATEVEMDHYREPFLNPVDREPLWRFPNELPIAGEPANIVALVEEYMDWLHQSPVPKLLFWGTPGVLIPPAEAARLAKSLPNCKAVDIGPGLNLLQEDNPDLIGSEIARWLSTLEISG

SEQ ID NO: 2145 - protein, 277 aa, Synthetic construct
MFHYVDVGPRDGTPVLFLHGNPTSSYVWRNIIPHVAPTHRCIAPDLIGMGKSDKPDLGYFFDDHVRFMDAFIEALGLEEVVLVIHDWGSALGFHWAKRNPERVKGIAFMEFIRPIPTWDEWPEFARETFQAFRTTDVGRKLIIDQNVFIEGTLPMGVVRPLSEVEMDHYREPFLNPVDREPLWRFPNELPIAGEPANIVALVEEYMDWLHQSPVPKLLFWGTPGVLIPPAEAARLAKSLPNCKAVDIGPGLNLLQEDNPDLIGSEIARWLSTLEISG

SEQ ID NO: 2146 - protein, 277 aa, Synthetic construct
MFHYVDVGPRDGTPVLFLHGNPTSSYVWRNIIPHVAPTHRCIAPDLIGMGKSDKPDLGYFFDDHVRFMDAFIEALGLEEVVLVIHDWGSALGFHWAKRNPERVKGIAFMEFIRPIPTWDEWPEFARETFQAFRTTDVGRKLIIDQNVFIEGTLPMGVVRPLDEVEMDHYREPFLNPVDREPLWRFPNELPIAGEPANIVALVEEYMDWLHQSPVPKLLFWGTPGVLIPPAEAARLAKSLPNCKAVDIGPGLNLLQEDNPDLIGSEIARWLSTLEISG

SEQ ID NO: 2147 - protein, 277 aa, Synthetic construct
MFHYVDVGPRDGTPVLFLHGNPTSSYVWRNIIPHVAPTHRCIAPDLIGMGKSDKPDLGYFFDDHVRFMDAFIEALGLEEVVLVIHDWGSALGFHWAKRNPERVKGIAFMEFIRPIPTWDEWPEFARETFQAFRTTDVGRKLIIDQNVFIEGTLPMGVVRPLGEVEMDHYREPFLNPVDREPLWRFPNELPIAGEPANIVALVEEYMDWLHQSPVPKLLFWGTPGVLIPPAEAARLAKSLPNCKAVDIGPGLNLLQEDNPDLIGSEIARWLSTLEISG

SEQ ID NO: 2148 - protein, 277 aa, Synthetic construct
MFHYVDVGPRDGTPVLFLHGNPTSSYVWRNIIPHVAPTHRCIAPDLIGMGKSDKPDLGYFFDDHVRFMDAFIEALGLEEVVLVIHDWGSALGFHWAKRNPERVKGIAFMEFIRPIPTWDEWPEFARETFQAFRTTDVGRKLIIDQNVFIEGTLPMGVVRPLNEVEMDHYREPFLNPVDREPLWRFPNELPIAGEPANIVALVEEYMDWLHQSPVPKLLFWGTPGVLIPPAEAARLAKSLPNCKAVDIGPGLNLLQEDNPDLIGSEIARWLSTLEISG

SEQ ID NO: 2149 - protein, 277 aa, Synthetic construct
MFHYVDVGPRDGTPVLFLHGNPTSSYVWRNIIPHVAPTHRCIAPDLIGMGKSDKPDLGYFFDDHVRFMDAFIEALGLEEVVLVIHDWGSALGFHWAKRNPERVKGIAFMEFIRPIPTWDEWPEFARETFQAFRTTDVGRKLIIDQNVFIEGTLPMGVVRPLAEVEMDHYREPFLNPVDREPLWRFPNELPIAGEPANIVALVEEYMDWLHQSPVPKLLFWGTPGVLIPPAEAARLAKSLPNCKAVDIGPGLNLLQEDNPDLIGSEIARWLSTLEISG

SEQ ID NO: 2150 - protein, 277 aa, Synthetic construct
MFHYVDVGPRDGTPVLFLHGNPTSSYVWRNIIPHVAPTHRCIAPDLIGMGKSDKPDLGYFFDDHVRFMDAFIEALGLEEVVLVIHDWGSALGFHWAKRNPERVKGIAFMEFIRPIPTWDEWPEFARETFQAFRTTDVGRKLIIDQNVFIEGTLPMGVVRPLPEVEMDHYREPFLNPVDREPLWRFPNELPIAGEPANIVALVEEYMDWLHQSPVPKLLFWGTPGVLIPPAEAARLAKSLPNCKAVDIGPGLNLLQEDNPDLIGSEIARWLSTLEISG

SEQ ID NO: 2151 - protein, 277 aa, Synthetic construct
MFHYVDVGPRDGTPVLFLHGNPTSSYVWRNIIPHVAPTHRCIAPDLIGMGKSDKPDLGYFFDDHVRFMDAFIEALGLEEVVLVIHDWGSALGFHWAKRNPERVKGIAFMEFIRPIPTWDEWPEFARETFQAFRTTDVGRKLIIDQNVFIEGTLPMGVVRPLTDVEMDHYREPFLNPVDREPLWRFPNELPIAGEPANIVALVEEYMDWLHQSPVPKLLFWGTPGVLIPPAEAARLAKSLPNCKAVDIGPGLNLLQEDNPDLIGSEIARWLSTLEISG

SEQ ID NO: 2152 - protein, 277 aa, Synthetic construct
MFHYVDVGPRDGTPVLFLHGNPTSSYVWRNIIPHVAPTHRCIAPDLIGMGKSDKPDLGYFFDDHVRFMDAFIEALGLEEVVLVIHDWGSALGFHWAKRNPERVKGIAFMEFIRPIPTWDEWPEFARETFQAFRTTDVGRKLIIDQNVFIEGTLPMGVVRPLTPVEMDHYREPFLNPVDREPLWRFPNELPIAGEPANIVALVEEYMDWLHQSPVPKLLFWGTPGVLIPPAEAARLAKSLPNCKAVDIGPGLNLLQEDNPDLIGSEIARWLSTLEISG

SEQ ID NO: 2153 - protein, 277 aa, Synthetic construct
MFHYVDVGPRDGTPVLFLHGNPTSSYVWRNIIPHVAPTHRCIAPDLIGMGKSDKPDLGYFFDDHVRFMDAFIEALGLEEVVLVIHDWGSALGFHWAKRNPERVKGIAFMEFIRPIPTWDEWPEFARETFQAFRTTDVGRKLIIDQNVFIEGTLPMGVVRPLTQVEMDHYREPFLNPVDREPLWRFPNELPIAGEPANIVALVEEYMDWLHQSPVPKLLFWGTPGVLIPPAEAARLAKSLPNCKAVDIGPGLNLLQEDNPDLIGSEIARWLSTLEISG

SEQ ID NO: 2154 - protein, 277 aa, Synthetic construct
MFHYVDVGPRDGTPVLFLHGNPTSSYVWRNIIPHVAPTHRCIAPDLIGMGKSDKPDLGYFFDDHVRFMDAFIEALGLEEVVLVIHDWGSALGFHWAKRNPERVKGIAFMEFIRPIPTWDEWPEFARETFQAFRTTDVGRKLIIDQNVFIEGTLPMGVVRPLTAVEMDHYREPFLNPVDREPLWRFPNELPIAGEPANIVALVEEYMDWLHQSPVPKLLFWGTPGVLIPPAEAARLAKSLPNCKAVDIGPGLNLLQEDNPDLIGSEIARWLSTLEISG

SEQ ID NO: 2155 - protein, 277 aa, Synthetic construct
MFHYVDVGPRDGTPVLFLHGNPTSSYVWRNIIPHVAPTHRCIAPDLIGMGKSDKPDLGYFFDDHVRFMDAFIEALGLEEVVLVIHDWGSALGFHWAKRNPERVKGIAFMEFIRPIPTWDEWPEFARETFQAFRTTDVGRKLIIDQNVFIEGTLPMGVVRPLTKVEMDHYREPFLNPVDREPLWRFPNELPIAGEPANIVALVEEYMDWLHQSPVPKLLFWGTPGVLIPPAEAARLAKSLPNCKAVDIGPGLNLLQEDNPDLIGSEIARWLSTLEISG

SEQ ID NO: 2156 - protein, 277 aa, Synthetic construct
MFHYVDVGPRDGTPVLFLHGNPTSSYVWRNIIPHVAPTHRCIAPDLIGMGKSDKPDLGYFFDDHVRFMDAFIEALGLEEVVLVIHDWGSALGFHWAKRNPERVKGIAFMEFIRPIPTWDEWPEFARETFQAFRTTDVGRKLIIDQNVFIEGTLPMGVVRPLTSVEMDHYREPFLNPVDREPLWRFPNELPIAGEPANIVALVEEYMDWLHQSPVPKLLFWGTPGVLIPPAEAARLAKSLPNCKAVDIGPGLNLLQEDNPDLIGSEIARWLSTLEISG

SEQ ID NO: 2157 - protein, 277 aa, Synthetic construct
MFHYVDVGPRDGTPVLFLHGNPTSSYVWRNIIPHVAPTHRCIAPDLIGMGKSDKPDLGYFFDDHVRFMDAFIEALGLEEVVLVIHDWGSALGFHWAKRNPERVKGIAFMEFIRPIPTWDEWPEFARETFQAFRTTDVGRKLIIDQNVFIEGTLPMGVVRPLTEAEMDHYREPFLNPVDREPLWRFPNELPIAGEPANIVALVEEYMDWLHQSPVPKLLFWGTPGVLIPPAEAARLAKSLPNCKAVDIGPGLNLLQEDNPDLIGSEIARWLSTLEISG

SEQ ID NO: 2158 - protein, 277 aa, Synthetic construct
MFHYVDVGPRDGTPVLFLHGNPTSSYVWRNIIPHVAPTHRCIAPDLIGMGKSDKPDLGYFFDDHVRFMDAFIEALGLEEVVLVIHDWGSALGFHWAKRNPERVKGIAFMEFIRPIPTWDEWPEFARETFQAFRTTDVGRKLIIDQNVFIEGTLPMGVVRPLTEEEMDHYREPFLNPVDREPLWRFPNELPIAGEPANIVALVEEYMDWLHQSPVPKLLFWGTPGVLIPPAEAARLAKSLPNCKAVDIGPGLNLLQEDNPDLIGSEIARWLSTLEISG

SEQ ID NO: 2159 - protein, 277 aa, Synthetic construct
MFHYVDVGPRDGTPVLFLHGNPTSSYVWRNIIPHVAPTHRCIAPDLIGMGKSDKPDLGYFFDDHVRFMDAFIEALGLEEVVLVIHDWGSALGFHWAKRNPERVKGIAFMEFIRPIPTWDEWPEFARETFQAFRTTDVGRKLIIDQNVFIEGTLPMGVVRPLTEQEMDHYREPFLNPVDREPLWRFPNELPIAGEPANIVALVEEYMDWLHQSPVPKLLFWGTPGVLIPPAEAARLAKSLPNCKAVDIGPGLNLLQEDNPDLIGSEIARWLSTLEISG

SEQ ID NO: 2160 - protein, 277 aa, Synthetic construct
MFHYVDVGPRDGTPVLFLHGNPTSSYVWRNIIPHVAPTHRCIAPDLIGMGKSDKPDLGYFFDDHVRFMDAFIEALGLEEVVLVIHDWGSALGFHWAKRNPERVKGIAFMEFIRPIPTWDEWPEFARETFQAFRTTDVGRKLIIDQNVFIEGTLPMGVVRPLTEDEMDHYREPFLNPVDREPLWRFPNELPIAGEPANIVALVEEYMDWLHQSPVPKLLFWGTPGVLIPPAEAARLAKSLPNCKAVDIGPGLNLLQEDNPDLIGSEIARWLSTLEISG

SEQ ID NO: 2161 - protein, 277 aa, Synthetic construct
MFHYVDVGPRDGTPVLFLHGNPTSSYVWRNIIPHVAPTHRCIAPDLIGMGKSDKPDLGYFFDDHVRFMDAFIEALGLEEVVLVIHDWGSALGFHWAKRNPERVKGIAFMEFIRPIPTWDEWPEFARETFQAFRTTDVGRKLIIDQNVFIEGTLPMGVVRPLTESEMDHYREPFLNPVDREPLWRFPNELPIAGEPANIVALVEEYMDWLHQSPVPKLLFWGTPGVLIPPAEAARLAKSLPNCKAVDIGPGLNLLQEDNPDLIGSEIARWLSTLEISG

SEQ ID NO: 2162 - protein, 277 aa, Synthetic construct
MFHYVDVGPRDGTPVLFLHGNPTSSYVWRNIIPHVAPTHRCIAPDLIGMGKSDKPDLGYFFDDHVRFMDAFIEALGLEEVVLVIHDWGSALGFHWAKRNPERVKGIAFMEFIRPIPTWDEWPEFARETFQAFRTTDVGRKLIIDQNVFIEGTLPMGVVRPLTETEMDHYREPFLNPVDREPLWRFPNELPIAGEPANIVALVEEYMDWLHQSPVPKLLFWGTPGVLIPPAEAARLAKSLPNCKAVDIGPGLNLLQEDNPDLIGSEIARWLSTLEISG

SEQ ID NO: 2163 - protein, 277 aa, Synthetic construct
MFHYVDVGPRDGTPVLFLHGNPTSSYVWRNIIPHVAPTHRCIAPDLIGMGKSDKPDLGYFFDDHVRFMDAFIEALGLEEVVLVIHDWGSALGFHWAKRNPERVKGIAFMEFIRPIPTWDEWPEFARETFQAFRTTDVGRKLIIDQNVFIEGTLPMGVVRPLTEVDMDHYREPFLNPVDREPLWRFPNELPIAGEPANIVALVEEYMDWLHQSPVPKLLFWGTPGVLIPPAEAARLAKSLPNCKAVDIGPGLNLLQEDNPDLIGSEIARWLSTLEISG

SEQ ID NO: 2164 - protein, 277 aa, Synthetic construct
MFHYVDVGPRDGTPVLFLHGNPTSSYVWRNIIPHVAPTHRCIAPDLIGMGKSDKPDLGYFFDDHVRFMDAFIEALGLEEVVLVIHDWGSALGFHWAKRNPERVKGIAFMEFIRPIPTWDEWPEFARETFQAFRTTDVGRKLIIDQNVFIEGTLPMGVVRPLTEVQMDHYREPFLNPVDREPLWRFPNELPIAGEPANIVALVEEYMDWLHQSPVPKLLFWGTPGVLIPPAEAARLAKSLPNCKAVDIGPGLNLLQEDNPDLIGSEIARWLSTLEISG

SEQ ID NO: 2165 - protein, 277 aa, Synthetic construct
MFHYVDVGPRDGTPVLFLHGNPTSSYVWRNIIPHVAPTHRCIAPDLIGMGKSDKPDLGYFFDDHVRFMDAFIEALGLEEVVLVIHDWGSALGFHWAKRNPERVKGIAFMEFIRPIPTWDEWPEFARETFQAFRTTDVGRKLIIDQNVFIEGTLPMGVVRPLTEVAMDHYREPFLNPVDREPLWRFPNELPIAGEPANIVALVEEYMDWLHQSPVPKLLFWGTPGVLIPPAEAARLAKSLPNCKAVDIGPGLNLLQEDNPDLIGSEIARWLSTLEISG

SEQ ID NO: 2166 - protein, 277 aa, Synthetic construct
MFHYVDVGPRDGTPVLFLHGNPTSSYVWRNIIPHVAPTHRCIAPDLIGMGKSDKPDLGYFFDDHVRFMDAFIEALGLEEVVLVIHDWGSALGFHWAKRNPERVKGIAFMEFIRPIPTWDEWPEFARETFQAFRTTDVGRKLIIDQNVFIEGTLPMGVVRPLTEVVMDHYREPFLNPVDREPLWRFPNELPIAGEPANIVALVEEYMDWLHQSPVPKLLFWGTPGVLIPPAEAARLAKSLPNCKAVDIGPGLNLLQEDNPDLIGSEIARWLSTLEISG

SEQ ID NO: 2167 - protein, 277 aa, Synthetic construct
MFHYVDVGPRDGTPVLFLHGNPTSSYVWRNIIPHVAPTHRCIAPDLIGMGKSDKPDLGYFFDDHVRFMDAFIEALGLEEVVLVIHDWGSALGFHWAKRNPERVKGIAFMEFIRPIPTWDEWPEFARETFQAFRTTDVGRKLIIDQNVFIEGTLPMGVVRPLTEVTMDHYREPFLNPVDREPLWRFPNELPIAGEPANIVALVEEYMDWLHQSPVPKLLFWGTPGVLIPPAEAARLAKSLPNCKAVDIGPGLNLLQEDNPDLIGSEIARWLSTLEISG

SEQ ID NO: 2168 - protein, 277 aa, Synthetic construct
MFHYVDVGPRDGTPVLFLHGNPTSSYVWRNIIPHVAPTHRCIAPDLIGMGKSDKPDLGYFFDDHVRFMDAFIEALGLEEVVLVIHDWGSALGFHWAKRNPERVKGIAFMEFIRPIPTWDEWPEFARETFQAFRTTDVGRKLIIDQNVFIEGTLPMGVVRPLTEVGMDHYREPFLNPVDREPLWRFPNELPIAGEPANIVALVEEYMDWLHQSPVPKLLFWGTPGVLIPPAEAARLAKSLPNCKAVDIGPGLNLLQEDNPDLIGSEIARWLSTLEISG

SEQ ID NO: 2169 - protein, 277 aa, Synthetic construct
MFHYVDVGPRDGTPVLFLHGNPTSSYVWRNIIPHVAPTHRCIAPDLIGMGKSDKPDLGYFFDDHVRFMDAFIEALGLEEVVLVIHDWGSALGFHWAKRNPERVKGIAFMEFIRPIPTWDEWPEFARETFQAFRTTDVGRKLIIDQNVFIEGTLPMGVVRPLTEVELDHYREPFLNPVDREPLWRFPNELPIAGEPANIVALVEEYMDWLHQSPVPKLLFWGTPGVLIPPAEAARLAKSLPNCKAVDIGPGLNLLQEDNPDLIGSEIARWLSTLEISG

SEQ ID NO: 2170 - protein, 277 aa, Synthetic construct
MFHYVDVGPRDGTPVLFLHGNPTSSYVWRNIIPHVAPTHRCIAPDLIGMGKSDKPDLGYFFDDHVRFMDAFIEALGLEEVVLVIHDWGSALGFHWAKRNPERVKGIAFMEFIRPIPTWDEWPEFARETFQAFRTTDVGRKLIIDQNVFIEGTLPMGVVRPLTEVERDHYREPFLNPVDREPLWRFPNELPIAGEPANIVALVEEYMDWLHQSPVPKLLFWGTPGVLIPPAEAARLAKSLPNCKAVDIGPGLNLLQEDNPDLIGSEIARWLSTLEISG

SEQ ID NO: 2171 - protein, 277 aa, Synthetic construct
MFHYVDVGPRDGTPVLFLHGNPTSSYVWRNIIPHVAPTHRCIAPDLIGMGKSDKPDLGYFFDDHVRFMDAFIEALGLEEVVLVIHDWGSALGFHWAKRNPERVKGIAFMEFIRPIPTWDEWPEFARETFQAFRTTDVGRKLIIDQNVFIEGTLPMGVVRPLTEVEIDHYREPFLNPVDREPLWRFPNELPIAGEPANIVALVEEYMDWLHQSPVPKLLFWGTPGVLIPPAEAARLAKSLPNCKAVDIGPGLNLLQEDNPDLIGSEIARWLSTLEISG

SEQ ID NO: 2172 - protein, 277 aa, Synthetic construct
MFHYVDVGPRDGTPVLFLHGNPTSSYVWRNIIPHVAPTHRCIAPDLIGMGKSDKPDLGYFFDDHVRFMDAFIEALGLEEVVLVIHDWGSALGFHWAKRNPERVKGIAFMEFIRPIPTWDEWPEFARETFQAFRTTDVGRKLIIDQNVFIEGTLPMGVVRPLTEVEKDHYREPFLNPVDREPLWRFPNELPIAGEPANIVALVEEYMDWLHQSPVPKLLFWGTPGVLIPPAEAARLAKSLPNCKAVDIGPGLNLLQEDNPDLIGSEIARWLSTLEISG

SEQ ID NO: 2173 - protein, 277 aa, Synthetic construct
MFHYVDVGPRDGTPVLFLHGNPTSSYVWRNIIPHVAPTHRCIAPDLIGMGKSDKPDLGYFFDDHVRFMDAFIEALGLEEVVLVIHDWGSALGFHWAKRNPERVKGIAFMEFIRPIPTWDEWPEFARETFQAFRTTDVGRKLIIDQNVFIEGTLPMGVVRPLTEVEHDHYREPFLNPVDREPLWRFPNELPIAGEPANIVALVEEYMDWLHQSPVPKLLFWGTPGVLIPPAEAARLAKSLPNCKAVDIGPGLNLLQEDNPDLIGSEIARWLSTLEISG

SEQ ID NO: 2174 - protein, 277 aa, Synthetic construct
MFHYVDVGPRDGTPVLFLHGNPTSSYVWRNIIPHVAPTHRCIAPDLIGMGKSDKPDLGYFFDDHVRFMDAFIEALGLEEVVLVIHDWGSALGFHWAKRNPERVKGIAFMEFIRPIPTWDEWPEFARETFQAFRTTDVGRKLIIDQNVFIEGTLPMGVVRPLTEVEVDHYREPFLNPVDREPLWRFPNELPIAGEPANIVALVEEYMDWLHQSPVPKLLFWGTPGVLIPPAEAARLAKSLPNCKAVDIGPGLNLLQEDNPDLIGSEIARWLSTLEISG

SEQ ID NO: 2175 - protein, 277 aa, Synthetic construct
MFHYVDVGPRDGTPVLFLHGNPTSSYVWRNIIPHVAPTHRCIAPDLIGMGKSDKPDLGYFFDDHVRFMDAFIEALGLEEVVLVIHDWGSALGFHWAKRNPERVKGIAFMEFIRPIPTWDEWPEFARETFQAFRTTDVGRKLIIDQNVFIEGTLPMGVVRPLTEVEMAHYREPFLNPVDREPLWRFPNELPIAGEPANIVALVEEYMDWLHQSPVPKLLFWGTPGVLIPPAEAARLAKSLPNCKAVDIGPGLNLLQEDNPDLIGSEIARWLSTLEISG

SEQ ID NO: 2176 - protein, 277 aa, Synthetic construct
MFHYVDVGPRDGTPVLFLHGNPTSSYVWRNIIPHVAPTHRCIAPDLIGMGKSDKPDLGYFFDDHVRFMDAFIEALGLEEVVLVIHDWGSALGFHWAKRNPERVKGIAFMEFIRPIPTWDEWPEFARETFQAFRTTDVGRKLIIDQNVFIEGTLPMGVVRPLTEVEMEHYREPFLNPVDREPLWRFPNELPIAGEPANIVALVEEYMDWLHQSPVPKLLFWGTPGVLIPPAEAARLAKSLPNCKAVDIGPGLNLLQEDNPDLIGSEIARWLSTLEISG

SEQ ID NO: 2177 - protein, 277 aa, Synthetic construct
MFHYVDVGPRDGTPVLFLHGNPTSSYVWRNIIPHVAPTHRCIAPDLIGMGKSDKPDLGYFFDDHVRFMDAFIEALGLEEVVLVIHDWGSALGFHWAKRNPERVKGIAFMEFIRPIPTWDEWPEFARETFQAFRTTDVGRKLIIDQNVFIEGTLPMGVVRPLTEVEMQHYREPFLNPVDREPLWRFPNELPIAGEPANIVALVEEYMDWLHQSPVPKLLFWGTPGVLIPPAEAARLAKSLPNCKAVDIGPGLNLLQEDNPDLIGSEIARWLSTLEISG

SEQ ID NO: 2178 - protein, 277 aa, Synthetic construct
MFHYVDVGPRDGTPVLFLHGNPTSSYVWRNIIPHVAPTHRCIAPDLIGMGKSDKPDLGYFFDDHVRFMDAFIEALGLEEVVLVIHDWGSALGFHWAKRNPERVKGIAFMEFIRPIPTWDEWPEFARETFQAFRTTDVGRKLIIDQNVFIEGTLPMGVVRPLTEVEMRHYREPFLNPVDREPLWRFPNELPIAGEPANIVALVEEYMDWLHQSPVPKLLFWGTPGVLIPPAEAARLAKSLPNCKAVDIGPGLNLLQEDNPDLIGSEIARWLSTLEISG

SEQ ID NO: 2179 - protein, 277 aa, Synthetic construct
MFHYVDVGPRDGTPVLFLHGNPTSSYVWRNIIPHVAPTHRCIAPDLIGMGKSDKPDLGYFFDDHVRFMDAFIEALGLEEVVLVIHDWGSALGFHWAKRNPERVKGIAFMEFIRPIPTWDEWPEFARETFQAFRTTDVGRKLIIDQNVFIEGTLPMGVVRPLTEVEMKHYREPFLNPVDREPLWRFPNELPIAGEPANIVALVEEYMDWLHQSPVPKLLFWGTPGVLIPPAEAARLAKSLPNCKAVDIGPGLNLLQEDNPDLIGSEIARWLSTLEISG

SEQ ID NO: 2180 - protein, 277 aa, Synthetic construct
MFHYVDVGPRDGTPVLFLHGNPTSSYVWRNIIPHVAPTHRCIAPDLIGMGKSDKPDLGYFFDDHVRFMDAFIEALGLEEVVLVIHDWGSALGFHWAKRNPERVKGIAFMEFIRPIPTWDEWPEFARETFQAFRTTDVGRKLIIDQNVFIEGTLPMGVVRPLTEVEMNHYREPFLNPVDREPLWRFPNELPIAGEPANIVALVEEYMDWLHQSPVPKLLFWGTPGVLIPPAEAARLAKSLPNCKAVDIGPGLNLLQEDNPDLIGSEIARWLSTLEISG

SEQ ID NO: 2181 - protein, 277 aa, Synthetic construct
MFHYVDVGPRDGTPVLFLHGNPTSSYVWRNIIPHVAPTHRCIAPDLIGMGKSDKPDLGYFFDDHVRFMDAFIEALGLEEVVLVIHDWGSALGFHWAKRNPERVKGIAFMEFIRPIPTWDEWPEFARETFQAFRTTDVGRKLIIDQNVFIEGTLPMGVVRPLTEVEMDVYREPFLNPVDREPLWRFPNELPIAGEPANIVALVEEYMDWLHQSPVPKLLFWGTPGVLIPPAEAARLAKSLPNCKAVDIGPGLNLLQEDNPDLIGSEIARWLSTLEISG

SEQ ID NO: 2182 - protein, 277 aa, Synthetic construct
MFHYVDVGPRDGTPVLFLHGNPTSSYVWRNIIPHVAPTHRCIAPDLIGMGKSDKPDLGYFFDDHVRFMDAFIEALGLEEVVLVIHDWGSALGFHWAKRNPERVKGIAFMEFIRPIPTWDEWPEFARETFQAFRTTDVGRKLIIDQNVFIEGTLPMGVVRPLTEVEMDIYREPFLNPVDREPLWRFPNELPIAGEPANIVALVEEYMDWLHQSPVPKLLFWGTPGVLIPPAEAARLAKSLPNCKAVDIGPGLNLLQEDNPDLIGSEIARWLSTLEISG

SEQ ID NO: 2183 - protein, 277 aa, Synthetic construct
MFHYVDVGPRDGTPVLFLHGNPTSSYVWRNIIPHVAPTHRCIAPDLIGMGKSDKPDLGYFFDDHVRFMDAFIEALGLEEVVLVIHDWGSALGFHWAKRNPERVKGIAFMEFIRPIPTWDEWPEFARETFQAFRTTDVGRKLIIDQNVFIEGTLPMGVVRPLTEVEMDRYREPFLNPVDREPLWRFPNELPIAGEPANIVALVEEYMDWLHQSPVPKLLFWGTPGVLIPPAEAARLAKSLPNCKAVDIGPGLNLLQEDNPDLIGSEIARWLSTLEISG

SEQ ID NO: 2184 - protein, 277 aa, Synthetic construct
MFHYVDVGPRDGTPVLFLHGNPTSSYVWRNIIPHVAPTHRCIAPDLIGMGKSDKPDLGYFFDDHVRFMDAFIEALGLEEVVLVIHDWGSALGFHWAKRNPERVKGIAFMEFIRPIPTWDEWPEFARETFQAFRTTDVGRKLIIDQNVFIEGTLPMGVVRPLTEVEMDLYREPFLNPVDREPLWRFPNELPIAGEPANIVALVEEYMDWLHQSPVPKLLFWGTPGVLIPPAEAARLAKSLPNCKAVDIGPGLNLLQEDNPDLIGSEIARWLSTLEISG

SEQ ID NO: 2185 - protein, 277 aa, Synthetic construct
MFHYVDVGPRDGTPVLFLHGNPTSSYVWRNIIPHVAPTHRCIAPDLIGMGKSDKPDLGYFFDDHVRFMDAFIEALGLEEVVLVIHDWGSALGFHWAKRNPERVKGIAFMEFIRPIPTWDEWPEFARETFQAFRTTDVGRKLIIDQNVFIEGTLPMGVVRPLTEVEMDTYREPFLNPVDREPLWRFPNELPIAGEPANIVALVEEYMDWLHQSPVPKLLFWGTPGVLIPPAEAARLAKSLPNCKAVDIGPGLNLLQEDNPDLIGSEIARWLSTLEISG

SEQ ID NO: 2186 - protein, 277 aa, Synthetic construct
MFHYVDVGPRDGTPVLFLHGNPTSSYVWRNIIPHVAPTHRCIAPDLIGMGKSDKPDLGYFFDDHVRFMDAFIEALGLEEVVLVIHDWGSALGFHWAKRNPERVKGIAFMEFIRPIPTWDEWPEFARETFQAFRTTDVGRKLIIDQNVFIEGTLPMGVVRPLTEVEMDHLREPFLNPVDREPLWRFPNELPIAGEPANIVALVEEYMDWLHQSPVPKLLFWGTPGVLIPPAEAARLAKSLPNCKAVDIGPGLNLLQEDNPDLIGSEIARWLSTLEISG

SEQ ID NO: 2187 - protein, 277 aa, Synthetic construct
MFHYVDVGPRDGTPVLFLHGNPTSSYVWRNIIPHVAPTHRCIAPDLIGMGKSDKPDLGYFFDDHVRFMDAFIEALGLEEVVLVIHDWGSALGFHWAKRNPERVKGIAFMEFIRPIPTWDEWPEFARETFQAFRTTDVGRKLIIDQNVFIEGTLPMGVVRPLTEVEMDHWREPFLNPVDREPLWRFPNELPIAGEPANIVALVEEYMDWLHQSPVPKLLFWGTPGVLIPPAEAARLAKSLPNCKAVDIGPGLNLLQEDNPDLIGSEIARWLSTLEISG

SEQ ID NO: 2188 - protein, 277 aa, Synthetic construct
MFHYVDVGPRDGTPVLFLHGNPTSSYVWRNIIPHVAPTHRCIAPDLIGMGKSDKPDLGYFFDDHVRFMDAFIEALGLEEVVLVIHDWGSALGFHWAKRNPERVKGIAFMEFIRPIPTWDEWPEFARETFQAFRTTDVGRKLIIDQNVFIEGTLPMGVVRPLTEVEMDHHREPFLNPVDREPLWRFPNELPIAGEPANIVALVEEYMDWLHQSPVPKLLFWGTPGVLIPPAEAARLAKSLPNCKAVDIGPGLNLLQEDNPDLIGSEIARWLSTLEISG

SEQ ID NO: 2189 - protein, 277 aa, Synthetic construct
MFHYVDVGPRDGTPVLFLHGNPTSSYVWRNIIPHVAPTHRCIAPDLIGMGKSDKPDLGYFFDDHVRFMDAFIEALGLEEVVLVIHDWGSALGFHWAKRNPERVKGIAFMEFIRPIPTWDEWPEFARETFQAFRTTDVGRKLIIDQNVFIEGTLPMGVVRPLTEVEMDHCREPFLNPVDREPLWRFPNELPIAGEPANIVALVEEYMDWLHQSPVPKLLFWGTPGVLIPPAEAARLAKSLPNCKAVDIGPGLNLLQEDNPDLIGSEIARWLSTLEISG

SEQ ID NO: 2190 - protein, 277 aa, Synthetic construct
MFHYVDVGPRDGTPVLFLHGNPTSSYVWRNIIPHVAPTHRCIAPDLIGMGKSDKPDLGYFFDDHVRFMDAFIEALGLEEVVLVIHDWGSALGFHWAKRNPERVKGIAFMEFIRPIPTWDEWPEFARETFQAFRTTDVGRKLIIDQNVFIEGTLPMGVVRPLTEVEMDHIREPFLNPVDREPLWRFPNELPIAGEPANIVALVEEYMDWLHQSPVPKLLFWGTPGVLIPPAEAARLAKSLPNCKAVDIGPGLNLLQEDNPDLIGSEIARWLSTLEISG

SEQ ID NO: 2191 - protein, 277 aa, Synthetic construct
MFHYVDVGPRDGTPVLFLHGNPTSSYVWRNIIPHVAPTHRCIAPDLIGMGKSDKPDLGYFFDDHVRFMDAFIEALGLEEVVLVIHDWGSALGFHWAKRNPERVKGIAFMEFIRPIPTWDEWPEFARETFQAFRTTDVGRKLIIDQNVFIEGTLPMGVVRPLTEVEMDHYKEPFLNPVDREPLWRFPNELPIAGEPANIVALVEEYMDWLHQSPVPKLLFWGTPGVLIPPAEAARLAKSLPNCKAVDIGPGLNLLQEDNPDLIGSEIARWLSTLEISG

SEQ ID NO: 2192 - protein, 277 aa, Synthetic construct
MFHYVDVGPRDGTPVLFLHGNPTSSYVWRNIIPHVAPTHRCIAPDLIGMGKSDKPDLGYFFDDHVRFMDAFIEALGLEEVVLVIHDWGSALGFHWAKRNPERVKGIAFMEFIRPIPTWDEWPEFARETFQAFRTTDVGRKLIIDQNVFIEGTLPMGVVRPLTEVEMDHYLEPFLNPVDREPLWRFPNELPIAGEPANIVALVEEYMDWLHQSPVPKLLFWGTPGVLIPPAEAARLAKSLPNCKAVDIGPGLNLLQEDNPDLIGSEIARWLSTLEISG

SEQ ID NO: 2193 - protein, 277 aa, Synthetic construct
MFHYVDVGPRDGTPVLFLHGNPTSSYVWRNIIPHVAPTHRCIAPDLIGMGKSDKPDLGYFFDDHVRFMDAFIEALGLEEVVLVIHDWGSALGFHWAKRNPERVKGIAFMEFIRPIPTWDEWPEFARETFQAFRTTDVGRKLIIDQNVFIEGTLPMGVVRPLTEVEMDHYHEPFLNPVDREPLWRFPNELPIAGEPANIVALVEEYMDWLHQSPVPKLLFWGTPGVLIPPAEAARLAKSLPNCKAVDIGPGLNLLQEDNPDLIGSEIARWLSTLEISG

SEQ ID NO: 2194 - protein, 277 aa, Synthetic construct
MFHYVDVGPRDGTPVLFLHGNPTSSYVWRNIIPHVAPTHRCIAPDLIGMGKSDKPDLGYFFDDHVRFMDAFIEALGLEEVVLVIHDWGSALGFHWAKRNPERVKGIAFMEFIRPIPTWDEWPEFARETFQAFRTTDVGRKLIIDQNVFIEGTLPMGVVRPLTEVEMDHYQEPFLNPVDREPLWRFPNELPIAGEPANIVALVEEYMDWLHQSPVPKLLFWGTPGVLIPPAEAARLAKSLPNCKAVDIGPGLNLLQEDNPDLIGSEIARWLSTLEISG

SEQ ID NO: 2195 - protein, 277 aa, Synthetic construct
MFHYVDVGPRDGTPVLFLHGNPTSSYVWRNIIPHVAPTHRCIAPDLIGMGKSDKPDLGYFFDDHVRFMDAFIEALGLEEVVLVIHDWGSALGFHWAKRNPERVKGIAFMEFIRPIPTWDEWPEFARETFQAFRTTDVGRKLIIDQNVFIEGTLPMGVVRPLTEVEMDHYAEPFLNPVDREPLWRFPNELPIAGEPANIVALVEEYMDWLHQSPVPKLLFWGTPGVLIPPAEAARLAKSLPNCKAVDIGPGLNLLQEDNPDLIGSEIARWLSTLEISG

SEQ ID NO: 2196 - protein, 277 aa, Synthetic construct
MFHYVDVGPRDGTPVLFLHGNPTSSYVWRNIIPHVAPTHRCIAPDLIGMGKSDKPDLGYFFDDHVRFMDAFIEALGLEEVVLVIHDWGSALGFHWAKRNPERVKGIAFMEFIRPIPTWDEWPEFARETFQAFRTTDVGRKLIIDQNVFIEGTLPMGVVRPLTEVEMDHYVEPFLNPVDREPLWRFPNELPIAGEPANIVALVEEYMDWLHQSPVPKLLFWGTPGVLIPPAEAARLAKSLPNCKAVDIGPGLNLLQEDNPDLIGSEIARWLSTLEISG

SEQ ID NO: 2197 - protein, 277 aa, Synthetic construct
MFHYVDVGPRDGTPVLFLHGNPTSSYVWRNIIPHVAPTHRCIAPDLIGMGKSDKPDLGYFFDDHVRFMDAFIEALGLEEVVLVIHDWGSALGFHWAKRNPERVKGIAFMEFIRPIPTWDEWPEFARETFQAFRTTDVGRKLIIDQNVFIEGTLPMGVVRPLTEVEMDHYRRPFLNPVDREPLWRFPNELPIAGEPANIVALVEEYMDWLHQSPVPKLLFWGTPGVLIPPAEAARLAKSLPNCKAVDIGPGLNLLQEDNPDLIGSEIARWLSTLEISG

SEQ ID NO: 2198 - protein, 277 aa, Synthetic construct
MFHYVDVGPRDGTPVLFLHGNPTSSYVWRNIIPHVAPTHRCIAPDLIGMGKSDKPDLGYFFDDHVRFMDAFIEALGLEEVVLVIHDWGSALGFHWAKRNPERVKGIAFMEFIRPIPTWDEWPEFARETFQAFRTTDVGRKLIIDQNVFIEGTLPMGVVRPLTEVEMDHYRKPFLNPVDREPLWRFPNELPIAGEPANIVALVEEYMDWLHQSPVPKLLFWGTPGVLIPPAEAARLAKSLPNCKAVDIGPGLNLLQEDNPDLIGSEIARWLSTLEISG

SEQ ID NO: 2199 - protein, 277 aa, Synthetic construct
MFHYVDVGPRDGTPVLFLHGNPTSSYVWRNIIPHVAPTHRCIAPDLIGMGKSDKPDLGYFFDDHVRFMDAFIEALGLEEVVLVIHDWGSALGFHWAKRNPERVKGIAFMEFIRPIPTWDEWPEFARETFQAFRTTDVGRKLIIDQNVFIEGTLPMGVVRPLTEVEMDHYRQPFLNPVDREPLWRFPNELPIAGEPANIVALVEEYMDWLHQSPVPKLLFWGTPGVLIPPAEAARLAKSLPNCKAVDIGPGLNLLQEDNPDLIGSEIARWLSTLEISG

SEQ ID NO: 2200 - protein, 277 aa, Synthetic construct
MFHYVDVGPRDGTPVLFLHGNPTSSYVWRNIIPHVAPTHRCIAPDLIGMGKSDKPDLGYFFDDHVRFMDAFIEALGLEEVVLVIHDWGSALGFHWAKRNPERVKGIAFMEFIRPIPTWDEWPEFARETFQAFRTTDVGRKLIIDQNVFIEGTLPMGVVRPLTEVEMDHYRSPFLNPVDREPLWRFPNELPIAGEPANIVALVEEYMDWLHQSPVPKLLFWGTPGVLIPPAEAARLAKSLPNCKAVDIGPGLNLLQEDNPDLIGSEIARWLSTLEISG

SEQ ID NO: 2201 - protein, 277 aa, Synthetic construct
MFHYVDVGPRDGTPVLFLHGNPTSSYVWRNIIPHVAPTHRCIAPDLIGMGKSDKPDLGYFFDDHVRFMDAFIEALGLEEVVLVIHDWGSALGFHWAKRNPERVKGIAFMEFIRPIPTWDEWPEFARETFQAFRTTDVGRKLIIDQNVFIEGTLPMGVVRPLTEVEMDHYRTPFLNPVDREPLWRFPNELPIAGEPANIVALVEEYMDWLHQSPVPKLLFWGTPGVLIPPAEAARLAKSLPNCKAVDIGPGLNLLQEDNPDLIGSEIARWLSTLEISG

SEQ ID NO: 2202 - protein, 277 aa, Synthetic construct
MFHYVDVGPRDGTPVLFLHGNPTSSYVWRNIIPHVAPTHRCIAPDLIGMGKSDKPDLGYFFDDHVRFMDAFIEALGLEEVVLVIHDWGSALGFHWAKRNPERVKGIAFMEFIRPIPTWDEWPEFARETFQAFRTTDVGRKLIIDQNVFIEGTLPMGVVRPLTEVEMDHYREVFLNPVDREPLWRFPNELPIAGEPANIVALVEEYMDWLHQSPVPKLLFWGTPGVLIPPAEAARLAKSLPNCKAVDIGPGLNLLQEDNPDLIGSEIARWLSTLEISG

SEQ ID NO: 2203 - protein, 277 aa, Synthetic construct
MFHYVDVGPRDGTPVLFLHGNPTSSYVWRNIIPHVAPTHRCIAPDLIGMGKSDKPDLGYFFDDHVRFMDAFIEALGLEEVVLVIHDWGSALGFHWAKRNPERVKGIAFMEFIRPIPTWDEWPEFARETFQAFRTTDVGRKLIIDQNVFIEGTLPMGVVRPLTEVEMDHYRESFLNPVDREPLWRFPNELPIAGEPANIVALVEEYMDWLHQSPVPKLLFWGTPGVLIPPAEAARLAKSLPNCKAVDIGPGLNLLQEDNPDLIGSEIARWLSTLEISG

SEQ ID NO: 2204 - protein, 277 aa, Synthetic construct
MFHYVDVGPRDGTPVLFLHGNPTSSYVWRNIIPHVAPTHRCIAPDLIGMGKSDKPDLGYFFDDHVRFMDAFIEALGLEEVVLVIHDWGSALGFHWAKRNPERVKGIAFMEFIRPIPTWDEWPEFARETFQAFRTTDVGRKLIIDQNVFIEGTLPMGVVRPLTEVEMDHYRETFLNPVDREPLWRFPNELPIAGEPANIVALVEEYMDWLHQSPVPKLLFWGTPGVLIPPAEAARLAKSLPNCKAVDIGPGLNLLQEDNPDLIGSEIARWLSTLEISG

SEQ ID NO: 2205 - protein, 277 aa, Synthetic construct
MFHYVDVGPRDGTPVLFLHGNPTSSYVWRNIIPHVAPTHRCIAPDLIGMGKSDKPDLGYFFDDHVRFMDAFIEALGLEEVVLVIHDWGSALGFHWAKRNPERVKGIAFMEFIRPIPTWDEWPEFARETFQAFRTTDVGRKLIIDQNVFIEGTLPMGVVRPLTEVEMDHYRELFLNPVDREPLWRFPNELPIAGEPANIVALVEEYMDWLHQSPVPKLLFWGTPGVLIPPAEAARLAKSLPNCKAVDIGPGLNLLQEDNPDLIGSEIARWLSTLEISG

SEQ ID NO: 2206 - protein, 277 aa, Synthetic construct
MFHYVDVGPRDGTPVLFLHGNPTSSYVWRNIIPHVAPTHRCIAPDLIGMGKSDKPDLGYFFDDHVRFMDAFIEALGLEEVVLVIHDWGSALGFHWAKRNPERVKGIAFMEFIRPIPTWDEWPEFARETFQAFRTTDVGRKLIIDQNVFIEGTLPMGVVRPLTEVEMDHYREHFLNPVDREPLWRFPNELPIAGEPANIVALVEEYMDWLHQSPVPKLLFWGTPGVLIPPAEAARLAKSLPNCKAVDIGPGLNLLQEDNPDLIGSEIARWLSTLEISG

SEQ ID NO: 2207 - protein, 277 aa, Synthetic construct
MFHYVDVGPRDGTPVLFLHGNPTSSYVWRNIIPHVAPTHRCIAPDLIGMGKSDKPDLGYFFDDHVRFMDAFIEALGLEEVVLVIHDWGSALGFHWAKRNPERVKGIAFMEFIRPIPTWDEWPEFARETFQAFRTTDVGRKLIIDQNVFIEGTLPMGVVRPLTEVEMDHYREPWLNPVDREPLWRFPNELPIAGEPANIVALVEEYMDWLHQSPVPKLLFWGTPGVLIPPAEAARLAKSLPNCKAVDIGPGLNLLQEDNPDLIGSEIARWLSTLEISG

SEQ ID NO: 2208 - protein, 277 aa, Synthetic construct
MFHYVDVGPRDGTPVLFLHGNPTSSYVWRNIIPHVAPTHRCIAPDLIGMGKSDKPDLGYFFDDHVRFMDAFIEALGLEEVVLVIHDWGSALGFHWAKRNPERVKGIAFMEFIRPIPTWDEWPEFARETFQAFRTTDVGRKLIIDQNVFIEGTLPMGVVRPLTEVEMDHYREPLLNPVDREPLWRFPNELPIAGEPANIVALVEEYMDWLHQSPVPKLLFWGTPGVLIPPAEAARLAKSLPNCKAVDIGPGLNLLQEDNPDLIGSEIARWLSTLEISG

SEQ ID NO: 2209 - protein, 277 aa, Synthetic construct
MFHYVDVGPRDGTPVLFLHGNPTSSYVWRNIIPHVAPTHRCIAPDLIGMGKSDKPDLGYFFDDHVRFMDAFIEALGLEEVVLVIHDWGSALGFHWAKRNPERVKGIAFMEFIRPIPTWDEWPEFARETFQAFRTTDVGRKLIIDQNVFIEGTLPMGVVRPLTEVEMDHYREPMLNPVDREPLWRFPNELPIAGEPANIVALVEEYMDWLHQSPVPKLLFWGTPGVLIPPAEAARLAKSLPNCKAVDIGPGLNLLQEDNPDLIGSEIARWLSTLEISG

SEQ ID NO: 2210 - protein, 277 aa, Synthetic construct
MFHYVDVGPRDGTPVLFLHGNPTSSYVWRNIIPHVAPTHRCIAPDLIGMGKSDKPDLGYFFDDHVRFMDAFIEALGLEEVVLVIHDWGSALGFHWAKRNPERVKGIAFMEFIRPIPTWDEWPEFARETFQAFRTTDVGRKLIIDQNVFIEGTLPMGVVRPLTEVEMDHYREPHLNPVDREPLWRFPNELPIAGEPANIVALVEEYMDWLHQSPVPKLLFWGTPGVLIPPAEAARLAKSLPNCKAVDIGPGLNLLQEDNPDLIGSEIARWLSTLEISG

SEQ ID NO: 2211 - protein, 277 aa, Synthetic construct
MFHYVDVGPRDGTPVLFLHGNPTSSYVWRNIIPHVAPTHRCIAPDLIGMGKSDKPDLGYFFDDHVRFMDAFIEALGLEEVVLVIHDWGSALGFHWAKRNPERVKGIAFMEFIRPIPTWDEWPEFARETFQAFRTTDVGRKLIIDQNVFIEGTLPMGVVRPLTEVEMDHYREPVLNPVDREPLWRFPNELPIAGEPANIVALVEEYMDWLHQSPVPKLLFWGTPGVLIPPAEAARLAKSLPNCKAVDIGPGLNLLQEDNPDLIGSEIARWLSTLEISG

SEQ ID NO: 2212 - protein, 277 aa, Synthetic construct
MFHYVDVGPRDGTPVLFLHGNPTSSYVWRNIIPHVAPTHRCIAPDLIGMGKSDKPDLGYFFDDHVRFMDAFIEALGLEEVVLVIHDWGSALGFHWAKRNPERVKGIAFMEFIRPIPTWDEWPEFARETFQAFRTTDVGRKLIIDQNVFIEGTLPMGVVRPLTEVEMDHYREPFRNPVDREPLWRFPNELPIAGEPANIVALVEEYMDWLHQSPVPKLLFWGTPGVLIPPAEAARLAKSLPNCKAVDIGPGLNLLQEDNPDLIGSEIARWLSTLEISG

SEQ ID NO: 2213 - protein, 277 aa, Synthetic construct
MFHYVDVGPRDGTPVLFLHGNPTSSYVWRNIIPHVAPTHRCIAPDLIGMGKSDKPDLGYFFDDHVRFMDAFIEALGLEEVVLVIHDWGSALGFHWAKRNPERVKGIAFMEFIRPIPTWDEWPEFARETFQAFRTTDVGRKLIIDQNVFIEGTLPMGVVRPLTEVEMDHYREPFPNPVDREPLWRFPNELPIAGEPANIVALVEEYMDWLHQSPVPKLLFWGTPGVLIPPAEAARLAKSLPNCKAVDIGPGLNLLQEDNPDLIGSEIARWLSTLEISG

SEQ ID NO: 2214 - protein, 277 aa, Synthetic construct
MFHYVDVGPRDGTPVLFLHGNPTSSYVWRNIIPHVAPTHRCIAPDLIGMGKSDKPDLGYFFDDHVRFMDAFIEALGLEEVVLVIHDWGSALGFHWAKRNPERVKGIAFMEFIRPIPTWDEWPEFARETFQAFRTTDVGRKLIIDQNVFIEGTLPMGVVRPLTEVEMDHYREPFANPVDREPLWRFPNELPIAGEPANIVALVEEYMDWLHQSPVPKLLFWGTPGVLIPPAEAARLAKSLPNCKAVDIGPGLNLLQEDNPDLIGSEIARWLSTLEISG

SEQ ID NO: 2215 - protein, 277 aa, Synthetic construct
MFHYVDVGPRDGTPVLFLHGNPTSSYVWRNIIPHVAPTHRCIAPDLIGMGKSDKPDLGYFFDDHVRFMDAFIEALGLEEVVLVIHDWGSALGFHWAKRNPERVKGIAFMEFIRPIPTWDEWPEFARETFQAFRTTDVGRKLIIDQNVFIEGTLPMGVVRPLTEVEMDHYREPFVNPVDREPLWRFPNELPIAGEPANIVALVEEYMDWLHQSPVPKLLFWGTPGVLIPPAEAARLAKSLPNCKAVDIGPGLNLLQEDNPDLIGSEIARWLSTLEISG

SEQ ID NO: 2216 - protein, 277 aa, Synthetic construct
MFHYVDVGPRDGTPVLFLHGNPTSSYVWRNIIPHVAPTHRCIAPDLIGMGKSDKPDLGYFFDDHVRFMDAFIEALGLEEVVLVIHDWGSALGFHWAKRNPERVKGIAFMEFIRPIPTWDEWPEFARETFQAFRTTDVGRKLIIDQNVFIEGTLPMGVVRPLTEVEMDHYREPFSNPVDREPLWRFPNELPIAGEPANIVALVEEYMDWLHQSPVPKLLFWGTPGVLIPPAEAARLAKSLPNCKAVDIGPGLNLLQEDNPDLIGSEIARWLSTLEISG

SEQ ID NO: 2217 - protein, 277 aa, Synthetic construct
MFHYVDVGPRDGTPVLFLHGNPTSSYVWRNIIPHVAPTHRCIAPDLIGMGKSDKPDLGYFFDDHVRFMDAFIEALGLEEVVLVIHDWGSALGFHWAKRNPERVKGIAFMEFIRPIPTWDEWPEFARETFQAFRTTDVGRKLIIDQNVFIEGTLPMGVVRPLTEVEMDHYREPFTNPVDREPLWRFPNELPIAGEPANIVALVEEYMDWLHQSPVPKLLFWGTPGVLIPPAEAARLAKSLPNCKAVDIGPGLNLLQEDNPDLIGSEIARWLSTLEISG

SEQ ID NO: 2218 - protein, 277 aa, Synthetic construct
MFHYVDVGPRDGTPVLFLHGNPTSSYVWRNIIPHVAPTHRCIAPDLIGMGKSDKPDLGYFFDDHVRFMDAFIEALGLEEVVLVIHDWGSALGFHWAKRNPERVKGIAFMEFIRPIPTWDEWPEFARETFQAFRTTDVGRKLIIDQNVFIEGTLPMGVVRPLTEVEMDHYREPFLTPVDREPLWRFPNELPIAGEPANIVALVEEYMDWLHQSPVPKLLFWGTPGVLIPPAEAARLAKSLPNCKAVDIGPGLNLLQEDNPDLIGSEIARWLSTLEISG

SEQ ID NO: 2219 - protein, 277 aa, Synthetic construct
MFHYVDVGPRDGTPVLFLHGNPTSSYVWRNIIPHVAPTHRCIAPDLIGMGKSDKPDLGYFFDDHVRFMDAFIEALGLEEVVLVIHDWGSALGFHWAKRNPERVKGIAFMEFIRPIPTWDEWPEFARETFQAFRTTDVGRKLIIDQNVFIEGTLPMGVVRPLTEVEMDHYREPFLSPVDREPLWRFPNELPIAGEPANIVALVEEYMDWLHQSPVPKLLFWGTPGVLIPPAEAARLAKSLPNCKAVDIGPGLNLLQEDNPDLIGSEIARWLSTLEISG

SEQ ID NO: 2220 - protein, 277 aa, Synthetic construct
MFHYVDVGPRDGTPVLFLHGNPTSSYVWRNIIPHVAPTHRCIAPDLIGMGKSDKPDLGYFFDDHVRFMDAFIEALGLEEVVLVIHDWGSALGFHWAKRNPERVKGIAFMEFIRPIPTWDEWPEFARETFQAFRTTDVGRKLIIDQNVFIEGTLPMGVVRPLTEVEMDHYREPFLDPVDREPLWRFPNELPIAGEPANIVALVEEYMDWLHQSPVPKLLFWGTPGVLIPPAEAARLAKSLPNCKAVDIGPGLNLLQEDNPDLIGSEIARWLSTLEISG

SEQ ID NO: 2221 - protein, 277 aa, Synthetic construct
MFHYVDVGPRDGTPVLFLHGNPTSSYVWRNIIPHVAPTHRCIAPDLIGMGKSDKPDLGYFFDDHVRFMDAFIEALGLEEVVLVIHDWGSALGFHWAKRNPERVKGIAFMEFIRPIPTWDEWPEFARETFQAFRTTDVGRKLIIDQNVFIEGTLPMGVVRPLTEVEMDHYREPFLKPVDREPLWRFPNELPIAGEPANIVALVEEYMDWLHQSPVPKLLFWGTPGVLIPPAEAARLAKSLPNCKAVDIGPGLNLLQEDNPDLIGSEIARWLSTLEISG

SEQ ID NO: 2222 - protein, 277 aa, Synthetic construct
MFHYVDVGPRDGTPVLFLHGNPTSSYVWRNIIPHVAPTHRCIAPDLIGMGKSDKPDLGYFFDDHVRFMDAFIEALGLEEVVLVIHDWGSALGFHWAKRNPERVKGIAFMEFIRPIPTWDEWPEFARETFQAFRTTDVGRKLIIDQNVFIEGTLPMGVVRPLTEVEMDHYREPFLRPVDREPLWRFPNELPIAGEPANIVALVEEYMDWLHQSPVPKLLFWGTPGVLIPPAEAARLAKSLPNCKAVDIGPGLNLLQEDNPDLIGSEIARWLSTLEISG

SEQ ID NO: 2223 - protein, 277 aa, Synthetic construct
MFHYVDVGPRDGTPVLFLHGNPTSSYVWRNIIPHVAPTHRCIAPDLIGMGKSDKPDLGYFFDDHVRFMDAFIEALGLEEVVLVIHDWGSALGFHWAKRNPERVKGIAFMEFIRPIPTWDEWPEFARETFQAFRTTDVGRKLIIDQNVFIEGTLPMGVVRPLTEVEMDHYREPFLAPVDREPLWRFPNELPIAGEPANIVALVEEYMDWLHQSPVPKLLFWGTPGVLIPPAEAARLAKSLPNCKAVDIGPGLNLLQEDNPDLIGSEIARWLSTLEISG

SEQ ID NO: 2224 - protein, 277 aa, Synthetic construct
MFHYVDVGPRDGTPVLFLHGNPTSSYVWRNIIPHVAPTHRCIAPDLIGMGKSDKPDLGYFFDDHVRFMDAFIEALGLEEVVLVIHDWGSALGFHWAKRNPERVKGIAFMEFIRPIPTWDEWPEFARETFQAFRTTDVGRKLIIDQNVFIEGTLPMGVVRPLTEVEMDHYREPFLNAVDREPLWRFPNELPIAGEPANIVALVEEYMDWLHQSPVPKLLFWGTPGVLIPPAEAARLAKSLPNCKAVDIGPGLNLLQEDNPDLIGSEIARWLSTLEISG

SEQ ID NO: 2225 - protein, 277 aa, Synthetic construct
MFHYVDVGPRDGTPVLFLHGNPTSSYVWRNIIPHVAPTHRCIAPDLIGMGKSDKPDLGYFFDDHVRFMDAFIEALGLEEVVLVIHDWGSALGFHWAKRNPERVKGIAFMEFIRPIPTWDEWPEFARETFQAFRTTDVGRKLIIDQNVFIEGTLPMGVVRPLTEVEMDHYREPFLNEVDREPLWRFPNELPIAGEPANIVALVEEYMDWLHQSPVPKLLFWGTPGVLIPPAEAARLAKSLPNCKAVDIGPGLNLLQEDNPDLIGSEIARWLSTLEISG

SEQ ID NO: 2226 - protein, 277 aa, Synthetic construct
MFHYVDVGPRDGTPVLFLHGNPTSSYVWRNIIPHVAPTHRCIAPDLIGMGKSDKPDLGYFFDDHVRFMDAFIEALGLEEVVLVIHDWGSALGFHWAKRNPERVKGIAFMEFIRPIPTWDEWPEFARETFQAFRTTDVGRKLIIDQNVFIEGTLPMGVVRPLTEVEMDHYREPFLNRVDREPLWRFPNELPIAGEPANIVALVEEYMDWLHQSPVPKLLFWGTPGVLIPPAEAARLAKSLPNCKAVDIGPGLNLLQEDNPDLIGSEIARWLSTLEISG

SEQ ID NO: 2227 - protein, 277 aa, Synthetic construct
MFHYVDVGPRDGTPVLFLHGNPTSSYVWRNIIPHVAPTHRCIAPDLIGMGKSDKPDLGYFFDDHVRFMDAFIEALGLEEVVLVIHDWGSALGFHWAKRNPERVKGIAFMEFIRPIPTWDEWPEFARETFQAFRTTDVGRKLIIDQNVFIEGTLPMGVVRPLTEVEMDHYREPFLNKVDREPLWRFPNELPIAGEPANIVALVEEYMDWLHQSPVPKLLFWGTPGVLIPPAEAARLAKSLPNCKAVDIGPGLNLLQEDNPDLIGSEIARWLSTLEISG

SEQ ID NO: 2228 - protein, 277 aa, Synthetic construct
MFHYVDVGPRDGTPVLFLHGNPTSSYVWRNIIPHVAPTHRCIAPDLIGMGKSDKPDLGYFFDDHVRFMDAFIEALGLEEVVLVIHDWGSALGFHWAKRNPERVKGIAFMEFIRPIPTWDEWPEFARETFQAFRTTDVGRKLIIDQNVFIEGTLPMGVVRPLTEVEMDHYREPFLNSVDREPLWRFPNELPIAGEPANIVALVEEYMDWLHQSPVPKLLFWGTPGVLIPPAEAARLAKSLPNCKAVDIGPGLNLLQEDNPDLIGSEIARWLSTLEISG

SEQ ID NO: 2229 - protein, 277 aa, Synthetic construct
MFHYVDVGPRDGTPVLFLHGNPTSSYVWRNIIPHVAPTHRCIAPDLIGMGKSDKPDLGYFFDDHVRFMDAFIEALGLEEVVLVIHDWGSALGFHWAKRNPERVKGIAFMEFIRPIPTWDEWPEFARETFQAFRTTDVGRKLIIDQNVFIEGTLPMGVVRPLTEVEMDHYREPFLNDVDREPLWRFPNELPIAGEPANIVALVEEYMDWLHQSPVPKLLFWGTPGVLIPPAEAARLAKSLPNCKAVDIGPGLNLLQEDNPDLIGSEIARWLSTLEISG

SEQ ID NO: 2230 - protein, 277 aa, Synthetic construct
MFHYVDVGPRDGTPVLFLHGNPTSSYVWRNIIPHVAPTHRCIAPDLIGMGKSDKPDLGYFFDDHVRFMDAFIEALGLEEVVLVIHDWGSALGFHWAKRNPERVKGIAFMEFIRPIPTWDEWPEFARETFQAFRTTDVGRKLIIDQNVFIEGTLPMGVVRPLTEVEMDHYREPFLNPADREPLWRFPNELPIAGEPANIVALVEEYMDWLHQSPVPKLLFWGTPGVLIPPAEAARLAKSLPNCKAVDIGPGLNLLQEDNPDLIGSEIARWLSTLEISG

SEQ ID NO: 2231 - protein, 277 aa, Synthetic construct
MFHYVDVGPRDGTPVLFLHGNPTSSYVWRNIIPHVAPTHRCIAPDLIGMGKSDKPDLGYFFDDHVRFMDAFIEALGLEEVVLVIHDWGSALGFHWAKRNPERVKGIAFMEFIRPIPTWDEWPEFARETFQAFRTTDVGRKLIIDQNVFIEGTLPMGVVRPLTEVEMDHYREPFLNPEDREPLWRFPNELPIAGEPANIVALVEEYMDWLHQSPVPKLLFWGTPGVLIPPAEAARLAKSLPNCKAVDIGPGLNLLQEDNPDLIGSEIARWLSTLEISG

SEQ ID NO: 2232 - protein, 277 aa, Synthetic construct
MFHYVDVGPRDGTPVLFLHGNPTSSYVWRNIIPHVAPTHRCIAPDLIGMGKSDKPDLGYFFDDHVRFMDAFIEALGLEEVVLVIHDWGSALGFHWAKRNPERVKGIAFMEFIRPIPTWDEWPEFARETFQAFRTTDVGRKLIIDQNVFIEGTLPMGVVRPLTEVEMDHYREPFLNPDDREPLWRFPNELPIAGEPANIVALVEEYMDWLHQSPVPKLLFWGTPGVLIPPAEAARLAKSLPNCKAVDIGPGLNLLQEDNPDLIGSEIARWLSTLEISG

SEQ ID NO: 2233 - protein, 277 aa, Synthetic construct
MFHYVDVGPRDGTPVLFLHGNPTSSYVWRNIIPHVAPTHRCIAPDLIGMGKSDKPDLGYFFDDHVRFMDAFIEALGLEEVVLVIHDWGSALGFHWAKRNPERVKGIAFMEFIRPIPTWDEWPEFARETFQAFRTTDVGRKLIIDQNVFIEGTLPMGVVRPLTEVEMDHYREPFLNPKDREPLWRFPNELPIAGEPANIVALVEEYMDWLHQSPVPKLLFWGTPGVLIPPAEAARLAKSLPNCKAVDIGPGLNLLQEDNPDLIGSEIARWLSTLEISG

SEQ ID NO: 2234 - protein, 277 aa, Synthetic construct
MFHYVDVGPRDGTPVLFLHGNPTSSYVWRNIIPHVAPTHRCIAPDLIGMGKSDKPDLGYFFDDHVRFMDAFIEALGLEEVVLVIHDWGSALGFHWAKRNPERVKGIAFMEFIRPIPTWDEWPEFARETFQAFRTTDVGRKLIIDQNVFIEGTLPMGVVRPLTEVEMDHYREPFLNPQDREPLWRFPNELPIAGEPANIVALVEEYMDWLHQSPVPKLLFWGTPGVLIPPAEAARLAKSLPNCKAVDIGPGLNLLQEDNPDLIGSEIARWLSTLEISG

SEQ ID NO: 2235 - protein, 277 aa, Synthetic construct
MFHYVDVGPRDGTPVLFLHGNPTSSYVWRNIIPHVAPTHRCIAPDLIGMGKSDKPDLGYFFDDHVRFMDAFIEALGLEEVVLVIHDWGSALGFHWAKRNPERVKGIAFMEFIRPIPTWDEWPEFARETFQAFRTTDVGRKLIIDQNVFIEGTLPMGVVRPLTEVEMDHYREPFLNPGDREPLWRFPNELPIAGEPANIVALVEEYMDWLHQSPVPKLLFWGTPGVLIPPAEAARLAKSLPNCKAVDIGPGLNLLQEDNPDLIGSEIARWLSTLEISG

SEQ ID NO: 2236 - protein, 277 aa, Synthetic construct
MFHYVDVGPRDGTPVLFLHGNPTSSYVWRNIIPHVAPTHRCIAPDLIGMGKSDKPDLGYFFDDHVRFMDAFIEALGLEEVVLVIHDWGSALGFHWAKRNPERVKGIAFMEFIRPIPTWDEWPEFARETFQAFRTTDVGRKLIIDQNVFIEGTLPMGVVRPLTEVEMDHYREPFLNPVSREPLWRFPNELPIAGEPANIVALVEEYMDWLHQSPVPKLLFWGTPGVLIPPAEAARLAKSLPNCKAVDIGPGLNLLQEDNPDLIGSEIARWLSTLEISG

SEQ ID NO: 2237 - protein, 277 aa, Synthetic construct
MFHYVDVGPRDGTPVLFLHGNPTSSYVWRNIIPHVAPTHRCIAPDLIGMGKSDKPDLGYFFDDHVRFMDAFIEALGLEEVVLVIHDWGSALGFHWAKRNPERVKGIAFMEFIRPIPTWDEWPEFARETFQAFRTTDVGRKLIIDQNVFIEGTLPMGVVRPLTEVEMDHYREPFLNPVAREPLWRFPNELPIAGEPANIVALVEEYMDWLHQSPVPKLLFWGTPGVLIPPAEAARLAKSLPNCKAVDIGPGLNLLQEDNPDLIGSEIARWLSTLEISG

SEQ ID NO: 2238 - protein, 277 aa, Synthetic construct
MFHYVDVGPRDGTPVLFLHGNPTSSYVWRNIIPHVAPTHRCIAPDLIGMGKSDKPDLGYFFDDHVRFMDAFIEALGLEEVVLVIHDWGSALGFHWAKRNPERVKGIAFMEFIRPIPTWDEWPEFARETFQAFRTTDVGRKLIIDQNVFIEGTLPMGVVRPLTEVEMDHYREPFLNPVTREPLWRFPNELPIAGEPANIVALVEEYMDWLHQSPVPKLLFWGTPGVLIPPAEAARLAKSLPNCKAVDIGPGLNLLQEDNPDLIGSEIARWLSTLEISG

SEQ ID NO: 2239 - protein, 277 aa, Synthetic construct
MFHYVDVGPRDGTPVLFLHGNPTSSYVWRNIIPHVAPTHRCIAPDLIGMGKSDKPDLGYFFDDHVRFMDAFIEALGLEEVVLVIHDWGSALGFHWAKRNPERVKGIAFMEFIRPIPTWDEWPEFARETFQAFRTTDVGRKLIIDQNVFIEGTLPMGVVRPLTEVEMDHYREPFLNPVNREPLWRFPNELPIAGEPANIVALVEEYMDWLHQSPVPKLLFWGTPGVLIPPAEAARLAKSLPNCKAVDIGPGLNLLQEDNPDLIGSEIARWLSTLEISG

SEQ ID NO: 2240 - protein, 277 aa, Synthetic construct
MFHYVDVGPRDGTPVLFLHGNPTSSYVWRNIIPHVAPTHRCIAPDLIGMGKSDKPDLGYFFDDHVRFMDAFIEALGLEEVVLVIHDWGSALGFHWAKRNPERVKGIAFMEFIRPIPTWDEWPEFARETFQAFRTTDVGRKLIIDQNVFIEGTLPMGVVRPLTEVEMDHYREPFLNPVEREPLWRFPNELPIAGEPANIVALVEEYMDWLHQSPVPKLLFWGTPGVLIPPAEAARLAKSLPNCKAVDIGPGLNLLQEDNPDLIGSEIARWLSTLEISG

SEQ ID NO: 2241 - protein, 277 aa, Synthetic construct
MFHYVDVGPRDGTPVLFLHGNPTSSYVWRNIIPHVAPTHRCIAPDLIGMGKSDKPDLGYFFDDHVRFMDAFIEALGLEEVVLVIHDWGSALGFHWAKRNPERVKGIAFMEFIRPIPTWDEWPEFARETFQAFRTTDVGRKLIIDQNVFIEGTLPMGVVRPLTEVEMDHYREPFLNPVGREPLWRFPNELPIAGEPANIVALVEEYMDWLHQSPVPKLLFWGTPGVLIPPAEAARLAKSLPNCKAVDIGPGLNLLQEDNPDLIGSEIARWLSTLEISG

SEQ ID NO: 2242 - protein, 277 aa, Synthetic construct
MFHYVDVGPRDGTPVLFLHGNPTSSYVWRNIIPHVAPTHRCIAPDLIGMGKSDKPDLGYFFDDHVRFMDAFIEALGLEEVVLVIHDWGSALGFHWAKRNPERVKGIAFMEFIRPIPTWDEWPEFARETFQAFRTTDVGRKLIIDQNVFIEGTLPMGVVRPLTEVEMDHYREPFLNPVDKEPLWRFPNELPIAGEPANIVALVEEYMDWLHQSPVPKLLFWGTPGVLIPPAEAARLAKSLPNCKAVDIGPGLNLLQEDNPDLIGSEIARWLSTLEISG

SEQ ID NO: 2243 - protein, 277 aa, Synthetic construct
MFHYVDVGPRDGTPVLFLHGNPTSSYVWRNIIPHVAPTHRCIAPDLIGMGKSDKPDLGYFFDDHVRFMDAFIEALGLEEVVLVIHDWGSALGFHWAKRNPERVKGIAFMEFIRPIPTWDEWPEFARETFQAFRTTDVGRKLIIDQNVFIEGTLPMGVVRPLTEVEMDHYREPFLNPVDQEPLWRFPNELPIAGEPANIVALVEEYMDWLHQSPVPKLLFWGTPGVLIPPAEAARLAKSLPNCKAVDIGPGLNLLQEDNPDLIGSEIARWLSTLEISG

SEQ ID NO: 2244 - protein, 277 aa, Synthetic construct
MFHYVDVGPRDGTPVLFLHGNPTSSYVWRNIIPHVAPTHRCIAPDLIGMGKSDKPDLGYFFDDHVRFMDAFIEALGLEEVVLVIHDWGSALGFHWAKRNPERVKGIAFMEFIRPIPTWDEWPEFARETFQAFRTTDVGRKLIIDQNVFIEGTLPMGVVRPLTEVEMDHYREPFLNPVDHEPLWRFPNELPIAGEPANIVALVEEYMDWLHQSPVPKLLFWGTPGVLIPPAEAARLAKSLPNCKAVDIGPGLNLLQEDNPDLIGSEIARWLSTLEISG

SEQ ID NO: 2245 - protein, 277 aa, Synthetic construct
MFHYVDVGPRDGTPVLFLHGNPTSSYVWRNIIPHVAPTHRCIAPDLIGMGKSDKPDLGYFFDDHVRFMDAFIEALGLEEVVLVIHDWGSALGFHWAKRNPERVKGIAFMEFIRPIPTWDEWPEFARETFQAFRTTDVGRKLIIDQNVFIEGTLPMGVVRPLTEVEMDHYREPFLNPVDLEPLWRFPNELPIAGEPANIVALVEEYMDWLHQSPVPKLLFWGTPGVLIPPAEAARLAKSLPNCKAVDIGPGLNLLQEDNPDLIGSEIARWLSTLEISG

SEQ ID NO: 2246 - protein, 277 aa, Synthetic construct
MFHYVDVGPRDGTPVLFLHGNPTSSYVWRNIIPHVAPTHRCIAPDLIGMGKSDKPDLGYFFDDHVRFMDAFIEALGLEEVVLVIHDWGSALGFHWAKRNPERVKGIAFMEFIRPIPTWDEWPEFARETFQAFRTTDVGRKLIIDQNVFIEGTLPMGVVRPLTEVEMDHYREPFLNPVDAEPLWRFPNELPIAGEPANIVALVEEYMDWLHQSPVPKLLFWGTPGVLIPPAEAARLAKSLPNCKAVDIGPGLNLLQEDNPDLIGSEIARWLSTLEISG

SEQ ID NO: 2247 - protein, 277 aa, Synthetic construct
MFHYVDVGPRDGTPVLFLHGNPTSSYVWRNIIPHVAPTHRCIAPDLIGMGKSDKPDLGYFFDDHVRFMDAFIEALGLEEVVLVIHDWGSALGFHWAKRNPERVKGIAFMEFIRPIPTWDEWPEFARETFQAFRTTDVGRKLIIDQNVFIEGTLPMGVVRPLTEVEMDHYREPFLNPVDCEPLWRFPNELPIAGEPANIVALVEEYMDWLHQSPVPKLLFWGTPGVLIPPAEAARLAKSLPNCKAVDIGPGLNLLQEDNPDLIGSEIARWLSTLEISG

SEQ ID NO: 2248 - protein, 277 aa, Synthetic construct
MFHYVDVGPRDGTPVLFLHGNPTSSYVWRNIIPHVAPTHRCIAPDLIGMGKSDKPDLGYFFDDHVRFMDAFIEALGLEEVVLVIHDWGSALGFHWAKRNPERVKGIAFMEFIRPIPTWDEWPEFARETFQAFRTTDVGRKLIIDQNVFIEGTLPMGVVRPLTEVEMDHYREPFLNPVDRAPLWRFPNELPIAGEPANIVALVEEYMDWLHQSPVPKLLFWGTPGVLIPPAEAARLAKSLPNCKAVDIGPGLNLLQEDNPDLIGSEIARWLSTLEISG

SEQ ID NO: 2249 - protein, 277 aa, Synthetic construct
MFHYVDVGPRDGTPVLFLHGNPTSSYVWRNIIPHVAPTHRCIAPDLIGMGKSDKPDLGYFFDDHVRFMDAFIEALGLEEVVLVIHDWGSALGFHWAKRNPERVKGIAFMEFIRPIPTWDEWPEFARETFQAFRTTDVGRKLIIDQNVFIEGTLPMGVVRPLTEVEMDHYREPFLNPVDRLPLWRFPNELPIAGEPANIVALVEEYMDWLHQSPVPKLLFWGTPGVLIPPAEAARLAKSLPNCKAVDIGPGLNLLQEDNPDLIGSEIARWLSTLEISG

SEQ ID NO: 2250 - protein, 277 aa, Synthetic construct
MFHYVDVGPRDGTPVLFLHGNPTSSYVWRNIIPHVAPTHRCIAPDLIGMGKSDKPDLGYFFDDHVRFMDAFIEALGLEEVVLVIHDWGSALGFHWAKRNPERVKGIAFMEFIRPIPTWDEWPEFARETFQAFRTTDVGRKLIIDQNVFIEGTLPMGVVRPLTEVEMDHYREPFLNPVDRKPLWRFPNELPIAGEPANIVALVEEYMDWLHQSPVPKLLFWGTPGVLIPPAEAARLAKSLPNCKAVDIGPGLNLLQEDNPDLIGSEIARWLSTLEISG

SEQ ID NO: 2251 - protein, 277 aa, Synthetic construct
MFHYVDVGPRDGTPVLFLHGNPTSSYVWRNIIPHVAPTHRCIAPDLIGMGKSDKPDLGYFFDDHVRFMDAFIEALGLEEVVLVIHDWGSALGFHWAKRNPERVKGIAFMEFIRPIPTWDEWPEFARETFQAFRTTDVGRKLIIDQNVFIEGTLPMGVVRPLTEVEMDHYREPFLNPVDRQPLWRFPNELPIAGEPANIVALVEEYMDWLHQSPVPKLLFWGTPGVLIPPAEAARLAKSLPNCKAVDIGPGLNLLQEDNPDLIGSEIARWLSTLEISG

SEQ ID NO: 2252 - protein, 277 aa, Synthetic construct
MFHYVDVGPRDGTPVLFLHGNPTSSYVWRNIIPHVAPTHRCIAPDLIGMGKSDKPDLGYFFDDHVRFMDAFIEALGLEEVVLVIHDWGSALGFHWAKRNPERVKGIAFMEFIRPIPTWDEWPEFARETFQAFRTTDVGRKLIIDQNVFIEGTLPMGVVRPLTEVEMDHYREPFLNPVDRVPLWRFPNELPIAGEPANIVALVEEYMDWLHQSPVPKLLFWGTPGVLIPPAEAARLAKSLPNCKAVDIGPGLNLLQEDNPDLIGSEIARWLSTLEISG

SEQ ID NO: 2253 - protein, 277 aa, Synthetic construct
MFHYVDVGPRDGTPVLFLHGNPTSSYVWRNIIPHVAPTHRCIAPDLIGMGKSDKPDLGYFFDDHVRFMDAFIEALGLEEVVLVIHDWGSALGFHWAKRNPERVKGIAFMEFIRPIPTWDEWPEFARETFQAFRTTDVGRKLIIDQNVFIEGTLPMGVVRPLTEVEMDHYREPFLNPVDRRPLWRFPNELPIAGEPANIVALVEEYMDWLHQSPVPKLLFWGTPGVLIPPAEAARLAKSLPNCKAVDIGPGLNLLQEDNPDLIGSEIARWLSTLEISG

SEQ ID NO: 2254 - protein, 277 aa, Synthetic construct
MFHYVDVGPRDGTPVLFLHGNPTSSYVWRNIIPHVAPTHRCIAPDLIGMGKSDKPDLGYFFDDHVRFMDAFIEALGLEEVVLVIHDWGSALGFHWAKRNPERVKGIAFMEFIRPIPTWDEWPEFARETFQAFRTTDVGRKLIIDQNVFIEGTLPMGVVRPLTEVEMDHYREPFLNPVDREALWRFPNELPIAGEPANIVALVEEYMDWLHQSPVPKLLFWGTPGVLIPPAEAARLAKSLPNCKAVDIGPGLNLLQEDNPDLIGSEIARWLSTLEISG

SEQ ID NO: 2255 - protein, 277 aa, Synthetic construct
MFHYVDVGPRDGTPVLFLHGNPTSSYVWRNIIPHVAPTHRCIAPDLIGMGKSDKPDLGYFFDDHVRFMDAFIEALGLEEVVLVIHDWGSALGFHWAKRNPERVKGIAFMEFIRPIPTWDEWPEFARETFQAFRTTDVGRKLIIDQNVFIEGTLPMGVVRPLTEVEMDHYREPFLNPVDRESLWRFPNELPIAGEPANIVALVEEYMDWLHQSPVPKLLFWGTPGVLIPPAEAARLAKSLPNCKAVDIGPGLNLLQEDNPDLIGSEIARWLSTLEISG

SEQ ID NO: 2256 - protein, 277 aa, Synthetic construct
MFHYVDVGPRDGTPVLFLHGNPTSSYVWRNIIPHVAPTHRCIAPDLIGMGKSDKPDLGYFFDDHVRFMDAFIEALGLEEVVLVIHDWGSALGFHWAKRNPERVKGIAFMEFIRPIPTWDEWPEFARETFQAFRTTDVGRKLIIDQNVFIEGTLPMGVVRPLTEVEMDHYREPFLNPVDREGLWRFPNELPIAGEPANIVALVEEYMDWLHQSPVPKLLFWGTPGVLIPPAEAARLAKSLPNCKAVDIGPGLNLLQEDNPDLIGSEIARWLSTLEISG

SEQ ID NO: 2257 - protein, 277 aa, Synthetic construct
MFHYVDVGPRDGTPVLFLHGNPTSSYVWRNIIPHVAPTHRCIAPDLIGMGKSDKPDLGYFFDDHVRFMDAFIEALGLEEVVLVIHDWGSALGFHWAKRNPERVKGIAFMEFIRPIPTWDEWPEFARETFQAFRTTDVGRKLIIDQNVFIEGTLPMGVVRPLTEVEMDHYREPFLNPVDRETLWRFPNELPIAGEPANIVALVEEYMDWLHQSPVPKLLFWGTPGVLIPPAEAARLAKSLPNCKAVDIGPGLNLLQEDNPDLIGSEIARWLSTLEISG

SEQ ID NO: 2258 - protein, 277 aa, Synthetic construct
MFHYVDVGPRDGTPVLFLHGNPTSSYVWRNIIPHVAPTHRCIAPDLIGMGKSDKPDLGYFFDDHVRFMDAFIEALGLEEVVLVIHDWGSALGFHWAKRNPERVKGIAFMEFIRPIPTWDEWPEFARETFQAFRTTDVGRKLIIDQNVFIEGTLPMGVVRPLTEVEMDHYREPFLNPVDREVLWRFPNELPIAGEPANIVALVEEYMDWLHQSPVPKLLFWGTPGVLIPPAEAARLAKSLPNCKAVDIGPGLNLLQEDNPDLIGSEIARWLSTLEISG

SEQ ID NO: 2259 - protein, 277 aa, Synthetic construct
MFHYVDVGPRDGTPVLFLHGNPTSSYVWRNIIPHVAPTHRCIAPDLIGMGKSDKPDLGYFFDDHVRFMDAFIEALGLEEVVLVIHDWGSALGFHWAKRNPERVKGIAFMEFIRPIPTWDEWPEFARETFQAFRTTDVGRKLIIDQNVFIEGTLPMGVVRPLTEVEMDHYREPFLNPVDRELLWRFPNELPIAGEPANIVALVEEYMDWLHQSPVPKLLFWGTPGVLIPPAEAARLAKSLPNCKAVDIGPGLNLLQEDNPDLIGSEIARWLSTLEISG

SEQ ID NO: 2260 - protein, 277 aa, Synthetic construct
MFHYVDVGPRDGTPVLFLHGNPTSSYVWRNIIPHVAPTHRCIAPDLIGMGKSDKPDLGYFFDDHVRFMDAFIEALGLEEVVLVIHDWGSALGFHWAKRNPERVKGIAFMEFIRPIPTWDEWPEFARETFQAFRTTDVGRKLIIDQNVFIEGTLPMGVVRPLTEVEMDHYREPFLNPVDREPTWRFPNELPIAGEPANIVALVEEYMDWLHQSPVPKLLFWGTPGVLIPPAEAARLAKSLPNCKAVDIGPGLNLLQEDNPDLIGSEIARWLSTLEISG

SEQ ID NO: 2261 - protein, 277 aa, Synthetic construct
MFHYVDVGPRDGTPVLFLHGNPTSSYVWRNIIPHVAPTHRCIAPDLIGMGKSDKPDLGYFFDDHVRFMDAFIEALGLEEVVLVIHDWGSALGFHWAKRNPERVKGIAFMEFIRPIPTWDEWPEFARETFQAFRTTDVGRKLIIDQNVFIEGTLPMGVVRPLTEVEMDHYREPFLNPVDREPIWRFPNELPIAGEPANIVALVEEYMDWLHQSPVPKLLFWGTPGVLIPPAEAARLAKSLPNCKAVDIGPGLNLLQEDNPDLIGSEIARWLSTLEISG

SEQ ID NO: 2262 - protein, 277 aa, Synthetic construct
MFHYVDVGPRDGTPVLFLHGNPTSSYVWRNIIPHVAPTHRCIAPDLIGMGKSDKPDLGYFFDDHVRFMDAFIEALGLEEVVLVIHDWGSALGFHWAKRNPERVKGIAFMEFIRPIPTWDEWPEFARETFQAFRTTDVGRKLIIDQNVFIEGTLPMGVVRPLTEVEMDHYREPFLNPVDREPVWRFPNELPIAGEPANIVALVEEYMDWLHQSPVPKLLFWGTPGVLIPPAEAARLAKSLPNCKAVDIGPGLNLLQEDNPDLIGSEIARWLSTLEISG

SEQ ID NO: 2263 - protein, 277 aa, Synthetic construct
MFHYVDVGPRDGTPVLFLHGNPTSSYVWRNIIPHVAPTHRCIAPDLIGMGKSDKPDLGYFFDDHVRFMDAFIEALGLEEVVLVIHDWGSALGFHWAKRNPERVKGIAFMEFIRPIPTWDEWPEFARETFQAFRTTDVGRKLIIDQNVFIEGTLPMGVVRPLTEVEMDHYREPFLNPVDREPMWRFPNELPIAGEPANIVALVEEYMDWLHQSPVPKLLFWGTPGVLIPPAEAARLAKSLPNCKAVDIGPGLNLLQEDNPDLIGSEIARWLSTLEISG

SEQ ID NO: 2264 - protein, 277 aa, Synthetic construct
MFHYVDVGPRDGTPVLFLHGNPTSSYVWRNIIPHVAPTHRCIAPDLIGMGKSDKPDLGYFFDDHVRFMDAFIEALGLEEVVLVIHDWGSALGFHWAKRNPERVKGIAFMEFIRPIPTWDEWPEFARETFQAFRTTDVGRKLIIDQNVFIEGTLPMGVVRPLTEVEMDHYREPFLNPVDREPAWRFPNELPIAGEPANIVALVEEYMDWLHQSPVPKLLFWGTPGVLIPPAEAARLAKSLPNCKAVDIGPGLNLLQEDNPDLIGSEIARWLSTLEISG

SEQ ID NO: 2265 - protein, 277 aa, Synthetic construct
MFHYVDVGPRDGTPVLFLHGNPTSSYVWRNIIPHVAPTHRCIAPDLIGMGKSDKPDLGYFFDDHVRFMDAFIEALGLEEVVLVIHDWGSALGFHWAKRNPERVKGIAFMEFIRPIPTWDEWPEFARETFQAFRTTDVGRKLIIDQNVFIEGTLPMGVVRPLTEVEMDHYREPFLNPVDREPSWRFPNELPIAGEPANIVALVEEYMDWLHQSPVPKLLFWGTPGVLIPPAEAARLAKSLPNCKAVDIGPGLNLLQEDNPDLIGSEIARWLSTLEISG

SEQ ID NO: 2266 - protein, 277 aa, Synthetic construct
MFHYVDVGPRDGTPVLFLHGNPTSSYVWRNIIPHVAPTHRCIAPDLIGMGKSDKPDLGYFFDDHVRFMDAFIEALGLEEVVLVIHDWGSALGFHWAKRNPERVKGIAFMEFIRPIPTWDEWPEFARETFQAFRTTDVGRKLIIDQNVFIEGTLPMGVVRPLTEVEMDHYREPFLNPVDREPLLRFPNELPIAGEPANIVALVEEYMDWLHQSPVPKLLFWGTPGVLIPPAEAARLAKSLPNCKAVDIGPGLNLLQEDNPDLIGSEIARWLSTLEISG

SEQ ID NO: 2267 - protein, 277 aa, Synthetic construct
MFHYVDVGPRDGTPVLFLHGNPTSSYVWRNIIPHVAPTHRCIAPDLIGMGKSDKPDLGYFFDDHVRFMDAFIEALGLEEVVLVIHDWGSALGFHWAKRNPERVKGIAFMEFIRPIPTWDEWPEFARETFQAFRTTDVGRKLIIDQNVFIEGTLPMGVVRPLTEVEMDHYREPFLNPVDREPLRRFPNELPIAGEPANIVALVEEYMDWLHQSPVPKLLFWGTPGVLIPPAEAARLAKSLPNCKAVDIGPGLNLLQEDNPDLIGSEIARWLSTLEISG

SEQ ID NO: 2268 - protein, 277 aa, Synthetic construct
MFHYVDVGPRDGTPVLFLHGNPTSSYVWRNIIPHVAPTHRCIAPDLIGMGKSDKPDLGYFFDDHVRFMDAFIEALGLEEVVLVIHDWGSALGFHWAKRNPERVKGIAFMEFIRPIPTWDEWPEFARETFQAFRTTDVGRKLIIDQNVFIEGTLPMGVVRPLTEVEMDHYREPFLNPVDREPLYRFPNELPIAGEPANIVALVEEYMDWLHQSPVPKLLFWGTPGVLIPPAEAARLAKSLPNCKAVDIGPGLNLLQEDNPDLIGSEIARWLSTLEISG

SEQ ID NO: 2269 - protein, 277 aa, Synthetic construct
MFHYVDVGPRDGTPVLFLHGNPTSSYVWRNIIPHVAPTHRCIAPDLIGMGKSDKPDLGYFFDDHVRFMDAFIEALGLEEVVLVIHDWGSALGFHWAKRNPERVKGIAFMEFIRPIPTWDEWPEFARETFQAFRTTDVGRKLIIDQNVFIEGTLPMGVVRPLTEVEMDHYREPFLNPVDREPLFRFPNELPIAGEPANIVALVEEYMDWLHQSPVPKLLFWGTPGVLIPPAEAARLAKSLPNCKAVDIGPGLNLLQEDNPDLIGSEIARWLSTLEISG

SEQ ID NO: 2270 - protein, 277 aa, Synthetic construct
MFHYVDVGPRDGTPVLFLHGNPTSSYVWRNIIPHVAPTHRCIAPDLIGMGKSDKPDLGYFFDDHVRFMDAFIEALGLEEVVLVIHDWGSALGFHWAKRNPERVKGIAFMEFIRPIPTWDEWPEFARETFQAFRTTDVGRKLIIDQNVFIEGTLPMGVVRPLTEVEMDHYREPFLNPVDREPLMRFPNELPIAGEPANIVALVEEYMDWLHQSPVPKLLFWGTPGVLIPPAEAARLAKSLPNCKAVDIGPGLNLLQEDNPDLIGSEIARWLSTLEISG

SEQ ID NO: 2271 - protein, 277 aa, Synthetic construct
MFHYVDVGPRDGTPVLFLHGNPTSSYVWRNIIPHVAPTHRCIAPDLIGMGKSDKPDLGYFFDDHVRFMDAFIEALGLEEVVLVIHDWGSALGFHWAKRNPERVKGIAFMEFIRPIPTWDEWPEFARETFQAFRTTDVGRKLIIDQNVFIEGTLPMGVVRPLTEVEMDHYREPFLNPVDREPLIRFPNELPIAGEPANIVALVEEYMDWLHQSPVPKLLFWGTPGVLIPPAEAARLAKSLPNCKAVDIGPGLNLLQEDNPDLIGSEIARWLSTLEISG

SEQ ID NO: 2272 - protein, 277 aa, Synthetic construct
MFHYVDVGPRDGTPVLFLHGNPTSSYVWRNIIPHVAPTHRCIAPDLIGMGKSDKPDLGYFFDDHVRFMDAFIEALGLEEVVLVIHDWGSALGFHWAKRNPERVKGIAFMEFIRPIPTWDEWPEFARETFQAFRTTDVGRKLIIDQNVFIEGTLPMGVVRPLTEVEMDHYREPFLNPVDREPLWQFPNELPIAGEPANIVALVEEYMDWLHQSPVPKLLFWGTPGVLIPPAEAARLAKSLPNCKAVDIGPGLNLLQEDNPDLIGSEIARWLSTLEISG

SEQ ID NO: 2273 - protein, 277 aa, Synthetic construct
MFHYVDVGPRDGTPVLFLHGNPTSSYVWRNIIPHVAPTHRCIAPDLIGMGKSDKPDLGYFFDDHVRFMDAFIEALGLEEVVLVIHDWGSALGFHWAKRNPERVKGIAFMEFIRPIPTWDEWPEFARETFQAFRTTDVGRKLIIDQNVFIEGTLPMGVVRPLTEVEMDHYREPFLNPVDREPLWKFPNELPIAGEPANIVALVEEYMDWLHQSPVPKLLFWGTPGVLIPPAEAARLAKSLPNCKAVDIGPGLNLLQEDNPDLIGSEIARWLSTLEISG

SEQ ID NO: 2274 - protein, 277 aa, Synthetic construct
MFHYVDVGPRDGTPVLFLHGNPTSSYVWRNIIPHVAPTHRCIAPDLIGMGKSDKPDLGYFFDDHVRFMDAFIEALGLEEVVLVIHDWGSALGFHWAKRNPERVKGIAFMEFIRPIPTWDEWPEFARETFQAFRTTDVGRKLIIDQNVFIEGTLPMGVVRPLTEVEMDHYREPFLNPVDREPLWAFPNELPIAGEPANIVALVEEYMDWLHQSPVPKLLFWGTPGVLIPPAEAARLAKSLPNCKAVDIGPGLNLLQEDNPDLIGSEIARWLSTLEISG

SEQ ID NO: 2275 - protein, 277 aa, Synthetic construct
MFHYVDVGPRDGTPVLFLHGNPTSSYVWRNIIPHVAPTHRCIAPDLIGMGKSDKPDLGYFFDDHVRFMDAFIEALGLEEVVLVIHDWGSALGFHWAKRNPERVKGIAFMEFIRPIPTWDEWPEFARETFQAFRTTDVGRKLIIDQNVFIEGTLPMGVVRPLTEVEMDHYREPFLNPVDREPLWTFPNELPIAGEPANIVALVEEYMDWLHQSPVPKLLFWGTPGVLIPPAEAARLAKSLPNCKAVDIGPGLNLLQEDNPDLIGSEIARWLSTLEISG

SEQ ID NO: 2276 - protein, 277 aa, Synthetic construct
MFHYVDVGPRDGTPVLFLHGNPTSSYVWRNIIPHVAPTHRCIAPDLIGMGKSDKPDLGYFFDDHVRFMDAFIEALGLEEVVLVIHDWGSALGFHWAKRNPERVKGIAFMEFIRPIPTWDEWPEFARETFQAFRTTDVGRKLIIDQNVFIEGTLPMGVVRPLTEVEMDHYREPFLNPVDREPLWSFPNELPIAGEPANIVALVEEYMDWLHQSPVPKLLFWGTPGVLIPPAEAARLAKSLPNCKAVDIGPGLNLLQEDNPDLIGSEIARWLSTLEISG

SEQ ID NO: 2277 - protein, 277 aa, Synthetic construct
MFHYVDVGPRDGTPVLFLHGNPTSSYVWRNIIPHVAPTHRCIAPDLIGMGKSDKPDLGYFFDDHVRFMDAFIEALGLEEVVLVIHDWGSALGFHWAKRNPERVKGIAFMEFIRPIPTWDEWPEFARETFQAFRTTDVGRKLIIDQNVFIEGTLPMGVVRPLTEVEMDHYREPFLNPVDREPLWLFPNELPIAGEPANIVALVEEYMDWLHQSPVPKLLFWGTPGVLIPPAEAARLAKSLPNCKAVDIGPGLNLLQEDNPDLIGSEIARWLSTLEISG

SEQ ID NO: 2278 - protein, 277 aa, Synthetic construct
MFHYVDVGPRDGTPVLFLHGNPTSSYVWRNIIPHVAPTHRCIAPDLIGMGKSDKPDLGYFFDDHVRFMDAFIEALGLEEVVLVIHDWGSALGFHWAKRNPERVKGIAFMEFIRPIPTWDEWPEFARETFQAFRTTDVGRKLIIDQNVFIEGTLPMGVVRPLTEVEMDHYREPFLNPVDREPLWRWPNELPIAGEPANIVALVEEYMDWLHQSPVPKLLFWGTPGVLIPPAEAARLAKSLPNCKAVDIGPGLNLLQEDNPDLIGSEIARWLSTLEISG

SEQ ID NO: 2279 - protein, 277 aa, Synthetic construct
MFHYVDVGPRDGTPVLFLHGNPTSSYVWRNIIPHVAPTHRCIAPDLIGMGKSDKPDLGYFFDDHVRFMDAFIEALGLEEVVLVIHDWGSALGFHWAKRNPERVKGIAFMEFIRPIPTWDEWPEFARETFQAFRTTDVGRKLIIDQNVFIEGTLPMGVVRPLTEVEMDHYREPFLNPVDREPLWRLPNELPIAGEPANIVALVEEYMDWLHQSPVPKLLFWGTPGVLIPPAEAARLAKSLPNCKAVDIGPGLNLLQEDNPDLIGSEIARWLSTLEISG

SEQ ID NO: 2280 - protein, 277 aa, Synthetic construct
MFHYVDVGPRDGTPVLFLHGNPTSSYVWRNIIPHVAPTHRCIAPDLIGMGKSDKPDLGYFFDDHVRFMDAFIEALGLEEVVLVIHDWGSALGFHWAKRNPERVKGIAFMEFIRPIPTWDEWPEFARETFQAFRTTDVGRKLIIDQNVFIEGTLPMGVVRPLTEVEMDHYREPFLNPVDREPLWRYPNELPIAGEPANIVALVEEYMDWLHQSPVPKLLFWGTPGVLIPPAEAARLAKSLPNCKAVDIGPGLNLLQEDNPDLIGSEIARWLSTLEISG

SEQ ID NO: 2281 - protein, 277 aa, Synthetic construct
MFHYVDVGPRDGTPVLFLHGNPTSSYVWRNIIPHVAPTHRCIAPDLIGMGKSDKPDLGYFFDDHVRFMDAFIEALGLEEVVLVIHDWGSALGFHWAKRNPERVKGIAFMEFIRPIPTWDEWPEFARETFQAFRTTDVGRKLIIDQNVFIEGTLPMGVVRPLTEVEMDHYREPFLNPVDREPLWRMPNELPIAGEPANIVALVEEYMDWLHQSPVPKLLFWGTPGVLIPPAEAARLAKSLPNCKAVDIGPGLNLLQEDNPDLIGSEIARWLSTLEISG

SEQ ID NO: 2282 - protein, 277 aa, Synthetic construct
MFHYVDVGPRDGTPVLFLHGNPTSSYVWRNIIPHVAPTHRCIAPDLIGMGKSDKPDLGYFFDDHVRFMDAFIEALGLEEVVLVIHDWGSALGFHWAKRNPERVKGIAFMEFIRPIPTWDEWPEFARETFQAFRTTDVGRKLIIDQNVFIEGTLPMGVVRPLTEVEMDHYREPFLNPVDREPLWRIPNELPIAGEPANIVALVEEYMDWLHQSPVPKLLFWGTPGVLIPPAEAARLAKSLPNCKAVDIGPGLNLLQEDNPDLIGSEIARWLSTLEISG

SEQ ID NO: 2283 - protein, 277 aa, Synthetic construct
MFHYVDVGPRDGTPVLFLHGNPTSSYVWRNIIPHVAPTHRCIAPDLIGMGKSDKPDLGYFFDDHVRFMDAFIEALGLEEVVLVIHDWGSALGFHWAKRNPERVKGIAFMEFIRPIPTWDEWPEFARETFQAFRTTDVGRKLIIDQNVFIEGTLPMGVVRPLTEVEMDHYREPFLNPVDREPLWRVPNELPIAGEPANIVALVEEYMDWLHQSPVPKLLFWGTPGVLIPPAEAARLAKSLPNCKAVDIGPGLNLLQEDNPDLIGSEIARWLSTLEISG

SEQ ID NO: 2284 - protein, 277 aa, Synthetic construct
MFHYVDVGPRDGTPVLFLHGNPTSSYVWRNIIPHVAPTHRCIAPDLIGMGKSDKPDLGYFFDDHVRFMDAFIEALGLEEVVLVIHDWGSALGFHWAKRNPERVKGIAFMEFIRPIPTWDEWPEFARETFQAFRTTDVGRKLIIDQNVFIEGTLPMGVVRPLTEVEMDHYREPFLNPVDREPLWRFANELPIAGEPANIVALVEEYMDWLHQSPVPKLLFWGTPGVLIPPAEAARLAKSLPNCKAVDIGPGLNLLQEDNPDLIGSEIARWLSTLEISG

SEQ ID NO: 2285 - protein, 277 aa, Synthetic construct
MFHYVDVGPRDGTPVLFLHGNPTSSYVWRNIIPHVAPTHRCIAPDLIGMGKSDKPDLGYFFDDHVRFMDAFIEALGLEEVVLVIHDWGSALGFHWAKRNPERVKGIAFMEFIRPIPTWDEWPEFARETFQAFRTTDVGRKLIIDQNVFIEGTLPMGVVRPLTEVEMDHYREPFLNPVDREPLWRFVNELPIAGEPANIVALVEEYMDWLHQSPVPKLLFWGTPGVLIPPAEAARLAKSLPNCKAVDIGPGLNLLQEDNPDLIGSEIARWLSTLEISG

SEQ ID NO: 2286 - protein, 277 aa, Synthetic construct
MFHYVDVGPRDGTPVLFLHGNPTSSYVWRNIIPHVAPTHRCIAPDLIGMGKSDKPDLGYFFDDHVRFMDAFIEALGLEEVVLVIHDWGSALGFHWAKRNPERVKGIAFMEFIRPIPTWDEWPEFARETFQAFRTTDVGRKLIIDQNVFIEGTLPMGVVRPLTEVEMDHYREPFLNPVDREPLWRFSNELPIAGEPANIVALVEEYMDWLHQSPVPKLLFWGTPGVLIPPAEAARLAKSLPNCKAVDIGPGLNLLQEDNPDLIGSEIARWLSTLEISG

SEQ ID NO: 2287 - protein, 277 aa, Synthetic construct
MFHYVDVGPRDGTPVLFLHGNPTSSYVWRNIIPHVAPTHRCIAPDLIGMGKSDKPDLGYFFDDHVRFMDAFIEALGLEEVVLVIHDWGSALGFHWAKRNPERVKGIAFMEFIRPIPTWDEWPEFARETFQAFRTTDVGRKLIIDQNVFIEGTLPMGVVRPLTEVEMDHYREPFLNPVDREPLWRFTNELPIAGEPANIVALVEEYMDWLHQSPVPKLLFWGTPGVLIPPAEAARLAKSLPNCKAVDIGPGLNLLQEDNPDLIGSEIARWLSTLEISG

SEQ ID NO: 2288 - protein, 277 aa, Synthetic construct
MFHYVDVGPRDGTPVLFLHGNPTSSYVWRNIIPHVAPTHRCIAPDLIGMGKSDKPDLGYFFDDHVRFMDAFIEALGLEEVVLVIHDWGSALGFHWAKRNPERVKGIAFMEFIRPIPTWDEWPEFARETFQAFRTTDVGRKLIIDQNVFIEGTLPMGVVRPLTEVEMDHYREPFLNPVDREPLWRFLNELPIAGEPANIVALVEEYMDWLHQSPVPKLLFWGTPGVLIPPAEAARLAKSLPNCKAVDIGPGLNLLQEDNPDLIGSEIARWLSTLEISG

SEQ ID NO: 2289 - protein, 277 aa, Synthetic construct
MFHYVDVGPRDGTPVLFLHGNPTSSYVWRNIIPHVAPTHRCIAPDLIGMGKSDKPDLGYFFDDHVRFMDAFIEALGLEEVVLVIHDWGSALGFHWAKRNPERVKGIAFMEFIRPIPTWDEWPEFARETFQAFRTTDVGRKLIIDQNVFIEGTLPMGVVRPLTEVEMDHYREPFLNPVDREPLWRFQNELPIAGEPANIVALVEEYMDWLHQSPVPKLLFWGTPGVLIPPAEAARLAKSLPNCKAVDIGPGLNLLQEDNPDLIGSEIARWLSTLEISG

SEQ ID NO: 2290 - protein, 277 aa, Synthetic construct
MFHYVDVGPRDGTPVLFLHGNPTSSYVWRNIIPHVAPTHRCIAPDLIGMGKSDKPDLGYFFDDHVRFMDAFIEALGLEEVVLVIHDWGSALGFHWAKRNPERVKGIAFMEFIRPIPTWDEWPEFARETFQAFRTTDVGRKLIIDQNVFIEGTLPMGVVRPLTEVEMDHYREPFLNPVDREPLWRFPSELPIAGEPANIVALVEEYMDWLHQSPVPKLLFWGTPGVLIPPAEAARLAKSLPNCKAVDIGPGLNLLQEDNPDLIGSEIARWLSTLEISG

SEQ ID NO: 2291 - protein, 277 aa, Synthetic construct
MFHYVDVGPRDGTPVLFLHGNPTSSYVWRNIIPHVAPTHRCIAPDLIGMGKSDKPDLGYFFDDHVRFMDAFIEALGLEEVVLVIHDWGSALGFHWAKRNPERVKGIAFMEFIRPIPTWDEWPEFARETFQAFRTTDVGRKLIIDQNVFIEGTLPMGVVRPLTEVEMDHYREPFLNPVDREPLWRFPRELPIAGEPANIVALVEEYMDWLHQSPVPKLLFWGTPGVLIPPAEAARLAKSLPNCKAVDIGPGLNLLQEDNPDLIGSEIARWLSTLEISG

SEQ ID NO: 2292 - protein, 277 aa, Synthetic construct
MFHYVDVGPRDGTPVLFLHGNPTSSYVWRNIIPHVAPTHRCIAPDLIGMGKSDKPDLGYFFDDHVRFMDAFIEALGLEEVVLVIHDWGSALGFHWAKRNPERVKGIAFMEFIRPIPTWDEWPEFARETFQAFRTTDVGRKLIIDQNVFIEGTLPMGVVRPLTEVEMDHYREPFLNPVDREPLWRFPQELPIAGEPANIVALVEEYMDWLHQSPVPKLLFWGTPGVLIPPAEAARLAKSLPNCKAVDIGPGLNLLQEDNPDLIGSEIARWLSTLEISG

SEQ ID NO: 2293 - protein, 277 aa, Synthetic construct
MFHYVDVGPRDGTPVLFLHGNPTSSYVWRNIIPHVAPTHRCIAPDLIGMGKSDKPDLGYFFDDHVRFMDAFIEALGLEEVVLVIHDWGSALGFHWAKRNPERVKGIAFMEFIRPIPTWDEWPEFARETFQAFRTTDVGRKLIIDQNVFIEGTLPMGVVRPLTEVEMDHYREPFLNPVDREPLWRFPAELPIAGEPANIVALVEEYMDWLHQSPVPKLLFWGTPGVLIPPAEAARLAKSLPNCKAVDIGPGLNLLQEDNPDLIGSEIARWLSTLEISG

SEQ ID NO: 2294 - protein, 277 aa, Synthetic construct
MFHYVDVGPRDGTPVLFLHGNPTSSYVWRNIIPHVAPTHRCIAPDLIGMGKSDKPDLGYFFDDHVRFMDAFIEALGLEEVVLVIHDWGSALGFHWAKRNPERVKGIAFMEFIRPIPTWDEWPEFARETFQAFRTTDVGRKLIIDQNVFIEGTLPMGVVRPLTEVEMDHYREPFLNPVDREPLWRFPTELPIAGEPANIVALVEEYMDWLHQSPVPKLLFWGTPGVLIPPAEAARLAKSLPNCKAVDIGPGLNLLQEDNPDLIGSEIARWLSTLEISG

SEQ ID NO: 2295 - protein, 277 aa, Synthetic construct
MFHYVDVGPRDGTPVLFLHGNPTSSYVWRNIIPHVAPTHRCIAPDLIGMGKSDKPDLGYFFDDHVRFMDAFIEALGLEEVVLVIHDWGSALGFHWAKRNPERVKGIAFMEFIRPIPTWDEWPEFARETFQAFRTTDVGRKLIIDQNVFIEGTLPMGVVRPLTEVEMDHYREPFLNPVDREPLWRFPLELPIAGEPANIVALVEEYMDWLHQSPVPKLLFWGTPGVLIPPAEAARLAKSLPNCKAVDIGPGLNLLQEDNPDLIGSEIARWLSTLEISG

SEQ ID NO: 2296 - protein, 277 aa, Synthetic construct
MFHYVDVGPRDGTPVLFLHGNPTSSYVWRNIIPHVAPTHRCIAPDLIGMGKSDKPDLGYFFDDHVRFMDAFIEALGLEEVVLVIHDWGSALGFHWAKRNPERVKGIAFMEFIRPIPTWDEWPEFARETFQAFRTTDVGRKLIIDQNVFIEGTLPMGVVRPLTEVEMDHYREPFLNPVDREPLWRFPNQLPIAGEPANIVALVEEYMDWLHQSPVPKLLFWGTPGVLIPPAEAARLAKSLPNCKAVDIGPGLNLLQEDNPDLIGSEIARWLSTLEISG

SEQ ID NO: 2297 - protein, 277 aa, Synthetic construct
MFHYVDVGPRDGTPVLFLHGNPTSSYVWRNIIPHVAPTHRCIAPDLIGMGKSDKPDLGYFFDDHVRFMDAFIEALGLEEVVLVIHDWGSALGFHWAKRNPERVKGIAFMEFIRPIPTWDEWPEFARETFQAFRTTDVGRKLIIDQNVFIEGTLPMGVVRPLTEVEMDHYREPFLNPVDREPLWRFPNDLPIAGEPANIVALVEEYMDWLHQSPVPKLLFWGTPGVLIPPAEAARLAKSLPNCKAVDIGPGLNLLQEDNPDLIGSEIARWLSTLEISG

SEQ ID NO: 2298 - protein, 277 aa, Synthetic construct
MFHYVDVGPRDGTPVLFLHGNPTSSYVWRNIIPHVAPTHRCIAPDLIGMGKSDKPDLGYFFDDHVRFMDAFIEALGLEEVVLVIHDWGSALGFHWAKRNPERVKGIAFMEFIRPIPTWDEWPEFARETFQAFRTTDVGRKLIIDQNVFIEGTLPMGVVRPLTEVEMDHYREPFLNPVDREPLWRFPNALPIAGEPANIVALVEEYMDWLHQSPVPKLLFWGTPGVLIPPAEAARLAKSLPNCKAVDIGPGLNLLQEDNPDLIGSEIARWLSTLEISG

SEQ ID NO: 2299 - protein, 277 aa, Synthetic construct
MFHYVDVGPRDGTPVLFLHGNPTSSYVWRNIIPHVAPTHRCIAPDLIGMGKSDKPDLGYFFDDHVRFMDAFIEALGLEEVVLVIHDWGSALGFHWAKRNPERVKGIAFMEFIRPIPTWDEWPEFARETFQAFRTTDVGRKLIIDQNVFIEGTLPMGVVRPLTEVEMDHYREPFLNPVDREPLWRFPNSLPIAGEPANIVALVEEYMDWLHQSPVPKLLFWGTPGVLIPPAEAARLAKSLPNCKAVDIGPGLNLLQEDNPDLIGSEIARWLSTLEISG

SEQ ID NO: 2300 - protein, 277 aa, Synthetic construct
MFHYVDVGPRDGTPVLFLHGNPTSSYVWRNIIPHVAPTHRCIAPDLIGMGKSDKPDLGYFFDDHVRFMDAFIEALGLEEVVLVIHDWGSALGFHWAKRNPERVKGIAFMEFIRPIPTWDEWPEFARETFQAFRTTDVGRKLIIDQNVFIEGTLPMGVVRPLTEVEMDHYREPFLNPVDREPLWRFPNMLPIAGEPANIVALVEEYMDWLHQSPVPKLLFWGTPGVLIPPAEAARLAKSLPNCKAVDIGPGLNLLQEDNPDLIGSEIARWLSTLEISG

SEQ ID NO: 2301 - protein, 277 aa, Synthetic construct
MFHYVDVGPRDGTPVLFLHGNPTSSYVWRNIIPHVAPTHRCIAPDLIGMGKSDKPDLGYFFDDHVRFMDAFIEALGLEEVVLVIHDWGSALGFHWAKRNPERVKGIAFMEFIRPIPTWDEWPEFARETFQAFRTTDVGRKLIIDQNVFIEGTLPMGVVRPLTEVEMDHYREPFLNPVDREPLWRFPNLLPIAGEPANIVALVEEYMDWLHQSPVPKLLFWGTPGVLIPPAEAARLAKSLPNCKAVDIGPGLNLLQEDNPDLIGSEIARWLSTLEISG

SEQ ID NO: 2302 - protein, 277 aa, Synthetic construct
MFHYVDVGPRDGTPVLFLHGNPTSSYVWRNIIPHVAPTHRCIAPDLIGMGKSDKPDLGYFFDDHVRFMDAFIEALGLEEVVLVIHDWGSALGFHWAKRNPERVKGIAFMEFIRPIPTWDEWPEFARETFQAFRTTDVGRKLIIDQNVFIEGTLPMGVVRPLTEVEMDHYREPFLNPVDREPLWRFPNEIPIAGEPANIVALVEEYMDWLHQSPVPKLLFWGTPGVLIPPAEAARLAKSLPNCKAVDIGPGLNLLQEDNPDLIGSEIARWLSTLEISG

SEQ ID NO: 2303 - protein, 277 aa, Synthetic construct
MFHYVDVGPRDGTPVLFLHGNPTSSYVWRNIIPHVAPTHRCIAPDLIGMGKSDKPDLGYFFDDHVRFMDAFIEALGLEEVVLVIHDWGSALGFHWAKRNPERVKGIAFMEFIRPIPTWDEWPEFARETFQAFRTTDVGRKLIIDQNVFIEGTLPMGVVRPLTEVEMDHYREPFLNPVDREPLWRFPNEVPIAGEPANIVALVEEYMDWLHQSPVPKLLFWGTPGVLIPPAEAARLAKSLPNCKAVDIGPGLNLLQEDNPDLIGSEIARWLSTLEISG

SEQ ID NO: 2304 - protein, 277 aa, Synthetic construct
MFHYVDVGPRDGTPVLFLHGNPTSSYVWRNIIPHVAPTHRCIAPDLIGMGKSDKPDLGYFFDDHVRFMDAFIEALGLEEVVLVIHDWGSALGFHWAKRNPERVKGIAFMEFIRPIPTWDEWPEFARETFQAFRTTDVGRKLIIDQNVFIEGTLPMGVVRPLTEVEMDHYREPFLNPVDREPLWRFPNEMPIAGEPANIVALVEEYMDWLHQSPVPKLLFWGTPGVLIPPAEAARLAKSLPNCKAVDIGPGLNLLQEDNPDLIGSEIARWLSTLEISG

SEQ ID NO: 2305 - protein, 277 aa, Synthetic construct
MFHYVDVGPRDGTPVLFLHGNPTSSYVWRNIIPHVAPTHRCIAPDLIGMGKSDKPDLGYFFDDHVRFMDAFIEALGLEEVVLVIHDWGSALGFHWAKRNPERVKGIAFMEFIRPIPTWDEWPEFARETFQAFRTTDVGRKLIIDQNVFIEGTLPMGVVRPLTEVEMDHYREPFLNPVDREPLWRFPNEFPIAGEPANIVALVEEYMDWLHQSPVPKLLFWGTPGVLIPPAEAARLAKSLPNCKAVDIGPGLNLLQEDNPDLIGSEIARWLSTLEISG

SEQ ID NO: 2306 - protein, 277 aa, Synthetic construct
MFHYVDVGPRDGTPVLFLHGNPTSSYVWRNIIPHVAPTHRCIAPDLIGMGKSDKPDLGYFFDDHVRFMDAFIEALGLEEVVLVIHDWGSALGFHWAKRNPERVKGIAFMEFIRPIPTWDEWPEFARETFQAFRTTDVGRKLIIDQNVFIEGTLPMGVVRPLTEVEMDHYREPFLNPVDREPLWRFPNETPIAGEPANIVALVEEYMDWLHQSPVPKLLFWGTPGVLIPPAEAARLAKSLPNCKAVDIGPGLNLLQEDNPDLIGSEIARWLSTLEISG

SEQ ID NO: 2307 - protein, 277 aa, Synthetic construct
MFHYVDVGPRDGTPVLFLHGNPTSSYVWRNIIPHVAPTHRCIAPDLIGMGKSDKPDLGYFFDDHVRFMDAFIEALGLEEVVLVIHDWGSALGFHWAKRNPERVKGIAFMEFIRPIPTWDEWPEFARETFQAFRTTDVGRKLIIDQNVFIEGTLPMGVVRPLTEVEMDHYREPFLNPVDREPLWRFPNEAPIAGEPANIVALVEEYMDWLHQSPVPKLLFWGTPGVLIPPAEAARLAKSLPNCKAVDIGPGLNLLQEDNPDLIGSEIARWLSTLEISG

SEQ ID NO: 2308 - protein, 277 aa, Synthetic construct
MFHYVDVGPRDGTPVLFLHGNPTSSYVWRNIIPHVAPTHRCIAPDLIGMGKSDKPDLGYFFDDHVRFMDAFIEALGLEEVVLVIHDWGSALGFHWAKRNPERVKGIAFMEFIRPIPTWDEWPEFARETFQAFRTTDVGRKLIIDQNVFIEGTLPMGVVRPLTEVEMDHYREPFLNPVDREPLWRFPNELAIAGEPANIVALVEEYMDWLHQSPVPKLLFWGTPGVLIPPAEAARLAKSLPNCKAVDIGPGLNLLQEDNPDLIGSEIARWLSTLEISG

SEQ ID NO: 2309 - protein, 277 aa, Synthetic construct
MFHYVDVGPRDGTPVLFLHGNPTSSYVWRNIIPHVAPTHRCIAPDLIGMGKSDKPDLGYFFDDHVRFMDAFIEALGLEEVVLVIHDWGSALGFHWAKRNPERVKGIAFMEFIRPIPTWDEWPEFARETFQAFRTTDVGRKLIIDQNVFIEGTLPMGVVRPLTEVEMDHYREPFLNPVDREPLWRFPNELSIAGEPANIVALVEEYMDWLHQSPVPKLLFWGTPGVLIPPAEAARLAKSLPNCKAVDIGPGLNLLQEDNPDLIGSEIARWLSTLEISG

SEQ ID NO: 2310 - protein, 277 aa, Synthetic construct
MFHYVDVGPRDGTPVLFLHGNPTSSYVWRNIIPHVAPTHRCIAPDLIGMGKSDKPDLGYFFDDHVRFMDAFIEALGLEEVVLVIHDWGSALGFHWAKRNPERVKGIAFMEFIRPIPTWDEWPEFARETFQAFRTTDVGRKLIIDQNVFIEGTLPMGVVRPLTEVEMDHYREPFLNPVDREPLWRFPNELEIAGEPANIVALVEEYMDWLHQSPVPKLLFWGTPGVLIPPAEAARLAKSLPNCKAVDIGPGLNLLQEDNPDLIGSEIARWLSTLEISG

SEQ ID NO: 2311 - protein, 277 aa, Synthetic construct
MFHYVDVGPRDGTPVLFLHGNPTSSYVWRNIIPHVAPTHRCIAPDLIGMGKSDKPDLGYFFDDHVRFMDAFIEALGLEEVVLVIHDWGSALGFHWAKRNPERVKGIAFMEFIRPIPTWDEWPEFARETFQAFRTTDVGRKLIIDQNVFIEGTLPMGVVRPLTEVEMDHYREPFLNPVDREPLWRFPNELTIAGEPANIVALVEEYMDWLHQSPVPKLLFWGTPGVLIPPAEAARLAKSLPNCKAVDIGPGLNLLQEDNPDLIGSEIARWLSTLEISG

SEQ ID NO: 2312 - protein, 277 aa, Synthetic construct
MFHYVDVGPRDGTPVLFLHGNPTSSYVWRNIIPHVAPTHRCIAPDLIGMGKSDKPDLGYFFDDHVRFMDAFIEALGLEEVVLVIHDWGSALGFHWAKRNPERVKGIAFMEFIRPIPTWDEWPEFARETFQAFRTTDVGRKLIIDQNVFIEGTLPMGVVRPLTEVEMDHYREPFLNPVDREPLWRFPNELLIAGEPANIVALVEEYMDWLHQSPVPKLLFWGTPGVLIPPAEAARLAKSLPNCKAVDIGPGLNLLQEDNPDLIGSEIARWLSTLEISG

SEQ ID NO: 2313 - protein, 277 aa, Synthetic construct
MFHYVDVGPRDGTPVLFLHGNPTSSYVWRNIIPHVAPTHRCIAPDLIGMGKSDKPDLGYFFDDHVRFMDAFIEALGLEEVVLVIHDWGSALGFHWAKRNPERVKGIAFMEFIRPIPTWDEWPEFARETFQAFRTTDVGRKLIIDQNVFIEGTLPMGVVRPLTEVEMDHYREPFLNPVDREPLWRFPNELQIAGEPANIVALVEEYMDWLHQSPVPKLLFWGTPGVLIPPAEAARLAKSLPNCKAVDIGPGLNLLQEDNPDLIGSEIARWLSTLEISG

SEQ ID NO: 2314 - protein, 277 aa, Synthetic construct
MFHYVDVGPRDGTPVLFLHGNPTSSYVWRNIIPHVAPTHRCIAPDLIGMGKSDKPDLGYFFDDHVRFMDAFIEALGLEEVVLVIHDWGSALGFHWAKRNPERVKGIAFMEFIRPIPTWDEWPEFARETFQAFRTTDVGRKLIIDQNVFIEGTLPMGVVRPLTEVEMDHYREPFLNPVDREPLWRFPNELPLAGEPANIVALVEEYMDWLHQSPVPKLLFWGTPGVLIPPAEAARLAKSLPNCKAVDIGPGLNLLQEDNPDLIGSEIARWLSTLEISG

SEQ ID NO: 2315 - protein, 277 aa, Synthetic construct
MFHYVDVGPRDGTPVLFLHGNPTSSYVWRNIIPHVAPTHRCIAPDLIGMGKSDKPDLGYFFDDHVRFMDAFIEALGLEEVVLVIHDWGSALGFHWAKRNPERVKGIAFMEFIRPIPTWDEWPEFARETFQAFRTTDVGRKLIIDQNVFIEGTLPMGVVRPLTEVEMDHYREPFLNPVDREPLWRFPNELPVAGEPANIVALVEEYMDWLHQSPVPKLLFWGTPGVLIPPAEAARLAKSLPNCKAVDIGPGLNLLQEDNPDLIGSEIARWLSTLEISG

SEQ ID NO: 2316 - protein, 277 aa, Synthetic construct
MFHYVDVGPRDGTPVLFLHGNPTSSYVWRNIIPHVAPTHRCIAPDLIGMGKSDKPDLGYFFDDHVRFMDAFIEALGLEEVVLVIHDWGSALGFHWAKRNPERVKGIAFMEFIRPIPTWDEWPEFARETFQAFRTTDVGRKLIIDQNVFIEGTLPMGVVRPLTEVEMDHYREPFLNPVDREPLWRFPNELPMAGEPANIVALVEEYMDWLHQSPVPKLLFWGTPGVLIPPAEAARLAKSLPNCKAVDIGPGLNLLQEDNPDLIGSEIARWLSTLEISG

SEQ ID NO: 2317 - protein, 277 aa, Synthetic construct
MFHYVDVGPRDGTPVLFLHGNPTSSYVWRNIIPHVAPTHRCIAPDLIGMGKSDKPDLGYFFDDHVRFMDAFIEALGLEEVVLVIHDWGSALGFHWAKRNPERVKGIAFMEFIRPIPTWDEWPEFARETFQAFRTTDVGRKLIIDQNVFIEGTLPMGVVRPLTEVEMDHYREPFLNPVDREPLWRFPNELPTAGEPANIVALVEEYMDWLHQSPVPKLLFWGTPGVLIPPAEAARLAKSLPNCKAVDIGPGLNLLQEDNPDLIGSEIARWLSTLEISG

SEQ ID NO: 2318 - protein, 277 aa, Synthetic construct
MFHYVDVGPRDGTPVLFLHGNPTSSYVWRNIIPHVAPTHRCIAPDLIGMGKSDKPDLGYFFDDHVRFMDAFIEALGLEEVVLVIHDWGSALGFHWAKRNPERVKGIAFMEFIRPIPTWDEWPEFARETFQAFRTTDVGRKLIIDQNVFIEGTLPMGVVRPLTEVEMDHYREPFLNPVDREPLWRFPNELPFAGEPANIVALVEEYMDWLHQSPVPKLLFWGTPGVLIPPAEAARLAKSLPNCKAVDIGPGLNLLQEDNPDLIGSEIARWLSTLEISG

SEQ ID NO: 2319 - protein, 277 aa, Synthetic construct
MFHYVDVGPRDGTPVLFLHGNPTSSYVWRNIIPHVAPTHRCIAPDLIGMGKSDKPDLGYFFDDHVRFMDAFIEALGLEEVVLVIHDWGSALGFHWAKRNPERVKGIAFMEFIRPIPTWDEWPEFARETFQAFRTTDVGRKLIIDQNVFIEGTLPMGVVRPLTEVEMDHYREPFLNPVDREPLWRFPNELPAAGEPANIVALVEEYMDWLHQSPVPKLLFWGTPGVLIPPAEAARLAKSLPNCKAVDIGPGLNLLQEDNPDLIGSEIARWLSTLEISG

SEQ ID NO: 2320 - protein, 277 aa, Synthetic construct
MFHYVDVGPRDGTPVLFLHGNPTSSYVWRNIIPHVAPTHRCIAPDLIGMGKSDKPDLGYFFDDHVRFMDAFIEALGLEEVVLVIHDWGSALGFHWAKRNPERVKGIAFMEFIRPIPTWDEWPEFARETFQAFRTTDVGRKLIIDQNVFIEGTLPMGVVRPLTEVEMDHYREPFLNPVDREPLWRFPNELPIEGEPANIVALVEEYMDWLHQSPVPKLLFWGTPGVLIPPAEAARLAKSLPNCKAVDIGPGLNLLQEDNPDLIGSEIARWLSTLEISG

SEQ ID NO: 2321 - protein, 277 aa, Synthetic construct
MFHYVDVGPRDGTPVLFLHGNPTSSYVWRNIIPHVAPTHRCIAPDLIGMGKSDKPDLGYFFDDHVRFMDAFIEALGLEEVVLVIHDWGSALGFHWAKRNPERVKGIAFMEFIRPIPTWDEWPEFARETFQAFRTTDVGRKLIIDQNVFIEGTLPMGVVRPLTEVEMDHYREPFLNPVDREPLWRFPNELPIDGEPANIVALVEEYMDWLHQSPVPKLLFWGTPGVLIPPAEAARLAKSLPNCKAVDIGPGLNLLQEDNPDLIGSEIARWLSTLEISG

SEQ ID NO: 2322 - protein, 277 aa, Synthetic construct
MFHYVDVGPRDGTPVLFLHGNPTSSYVWRNIIPHVAPTHRCIAPDLIGMGKSDKPDLGYFFDDHVRFMDAFIEALGLEEVVLVIHDWGSALGFHWAKRNPERVKGIAFMEFIRPIPTWDEWPEFARETFQAFRTTDVGRKLIIDQNVFIEGTLPMGVVRPLTEVEMDHYREPFLNPVDREPLWRFPNELPIGGEPANIVALVEEYMDWLHQSPVPKLLFWGTPGVLIPPAEAARLAKSLPNCKAVDIGPGLNLLQEDNPDLIGSEIARWLSTLEISG

SEQ ID NO: 2323 - protein, 277 aa, Synthetic construct
MFHYVDVGPRDGTPVLFLHGNPTSSYVWRNIIPHVAPTHRCIAPDLIGMGKSDKPDLGYFFDDHVRFMDAFIEALGLEEVVLVIHDWGSALGFHWAKRNPERVKGIAFMEFIRPIPTWDEWPEFARETFQAFRTTDVGRKLIIDQNVFIEGTLPMGVVRPLTEVEMDHYREPFLNPVDREPLWRFPNELPISGEPANIVALVEEYMDWLHQSPVPKLLFWGTPGVLIPPAEAARLAKSLPNCKAVDIGPGLNLLQEDNPDLIGSEIARWLSTLEISG

SEQ ID NO: 2324 - protein, 277 aa, Synthetic construct
MFHYVDVGPRDGTPVLFLHGNPTSSYVWRNIIPHVAPTHRCIAPDLIGMGKSDKPDLGYFFDDHVRFMDAFIEALGLEEVVLVIHDWGSALGFHWAKRNPERVKGIAFMEFIRPIPTWDEWPEFARETFQAFRTTDVGRKLIIDQNVFIEGTLPMGVVRPLTEVEMDHYREPFLNPVDREPLWRFPNELPIQGEPANIVALVEEYMDWLHQSPVPKLLFWGTPGVLIPPAEAARLAKSLPNCKAVDIGPGLNLLQEDNPDLIGSEIARWLSTLEISG

SEQ ID NO: 2325 - protein, 277 aa, Synthetic construct
MFHYVDVGPRDGTPVLFLHGNPTSSYVWRNIIPHVAPTHRCIAPDLIGMGKSDKPDLGYFFDDHVRFMDAFIEALGLEEVVLVIHDWGSALGFHWAKRNPERVKGIAFMEFIRPIPTWDEWPEFARETFQAFRTTDVGRKLIIDQNVFIEGTLPMGVVRPLTEVEMDHYREPFLNPVDREPLWRFPNELPINGEPANIVALVEEYMDWLHQSPVPKLLFWGTPGVLIPPAEAARLAKSLPNCKAVDIGPGLNLLQEDNPDLIGSEIARWLSTLEISG

SEQ ID NO: 2326 - protein, 277 aa, Synthetic construct
MFHYVDVGPRDGTPVLFLHGNPTSSYVWRNIIPHVAPTHRCIAPDLIGMGKSDKPDLGYFFDDHVRFMDAFIEALGLEEVVLVIHDWGSALGFHWAKRNPERVKGIAFMEFIRPIPTWDEWPEFARETFQAFRTTDVGRKLIIDQNVFIEGTLPMGVVRPLTEVEMDHYREPFLNPVDREPLWRFPNELPIADEPANIVALVEEYMDWLHQSPVPKLLFWGTPGVLIPPAEAARLAKSLPNCKAVDIGPGLNLLQEDNPDLIGSEIARWLSTLEISG

SEQ ID NO: 2327 - protein, 277 aa, Synthetic construct
MFHYVDVGPRDGTPVLFLHGNPTSSYVWRNIIPHVAPTHRCIAPDLIGMGKSDKPDLGYFFDDHVRFMDAFIEALGLEEVVLVIHDWGSALGFHWAKRNPERVKGIAFMEFIRPIPTWDEWPEFARETFQAFRTTDVGRKLIIDQNVFIEGTLPMGVVRPLTEVEMDHYREPFLNPVDREPLWRFPNELPIANEPANIVALVEEYMDWLHQSPVPKLLFWGTPGVLIPPAEAARLAKSLPNCKAVDIGPGLNLLQEDNPDLIGSEIARWLSTLEISG

SEQ ID NO: 2328 - protein, 277 aa, Synthetic construct
MFHYVDVGPRDGTPVLFLHGNPTSSYVWRNIIPHVAPTHRCIAPDLIGMGKSDKPDLGYFFDDHVRFMDAFIEALGLEEVVLVIHDWGSALGFHWAKRNPERVKGIAFMEFIRPIPTWDEWPEFARETFQAFRTTDVGRKLIIDQNVFIEGTLPMGVVRPLTEVEMDHYREPFLNPVDREPLWRFPNELPIAEEPANIVALVEEYMDWLHQSPVPKLLFWGTPGVLIPPAEAARLAKSLPNCKAVDIGPGLNLLQEDNPDLIGSEIARWLSTLEISG

SEQ ID NO: 2329 - protein, 277 aa, Synthetic construct
MFHYVDVGPRDGTPVLFLHGNPTSSYVWRNIIPHVAPTHRCIAPDLIGMGKSDKPDLGYFFDDHVRFMDAFIEALGLEEVVLVIHDWGSALGFHWAKRNPERVKGIAFMEFIRPIPTWDEWPEFARETFQAFRTTDVGRKLIIDQNVFIEGTLPMGVVRPLTEVEMDHYREPFLNPVDREPLWRFPNELPIAAEPANIVALVEEYMDWLHQSPVPKLLFWGTPGVLIPPAEAARLAKSLPNCKAVDIGPGLNLLQEDNPDLIGSEIARWLSTLEISG

SEQ ID NO: 2330 - protein, 277 aa, Synthetic construct
MFHYVDVGPRDGTPVLFLHGNPTSSYVWRNIIPHVAPTHRCIAPDLIGMGKSDKPDLGYFFDDHVRFMDAFIEALGLEEVVLVIHDWGSALGFHWAKRNPERVKGIAFMEFIRPIPTWDEWPEFARETFQAFRTTDVGRKLIIDQNVFIEGTLPMGVVRPLTEVEMDHYREPFLNPVDREPLWRFPNELPIASEPANIVALVEEYMDWLHQSPVPKLLFWGTPGVLIPPAEAARLAKSLPNCKAVDIGPGLNLLQEDNPDLIGSEIARWLSTLEISG

SEQ ID NO: 2331 - protein, 277 aa, Synthetic construct
MFHYVDVGPRDGTPVLFLHGNPTSSYVWRNIIPHVAPTHRCIAPDLIGMGKSDKPDLGYFFDDHVRFMDAFIEALGLEEVVLVIHDWGSALGFHWAKRNPERVKGIAFMEFIRPIPTWDEWPEFARETFQAFRTTDVGRKLIIDQNVFIEGTLPMGVVRPLTEVEMDHYREPFLNPVDREPLWRFPNELPIAREPANIVALVEEYMDWLHQSPVPKLLFWGTPGVLIPPAEAARLAKSLPNCKAVDIGPGLNLLQEDNPDLIGSEIARWLSTLEISG

SEQ ID NO: 2332 - protein, 277 aa, Synthetic construct
MFHYVDVGPRDGTPVLFLHGNPTSSYVWRNIIPHVAPTHRCIAPDLIGMGKSDKPDLGYFFDDHVRFMDAFIEALGLEEVVLVIHDWGSALGFHWAKRNPERVKGIAFMEFIRPIPTWDEWPEFARETFQAFRTTDVGRKLIIDQNVFIEGTLPMGVVRPLTEVEMDHYREPFLNPVDREPLWRFPNELPIAGDPANIVALVEEYMDWLHQSPVPKLLFWGTPGVLIPPAEAARLAKSLPNCKAVDIGPGLNLLQEDNPDLIGSEIARWLSTLEISG

SEQ ID NO: 2333 - protein, 277 aa, Synthetic construct
MFHYVDVGPRDGTPVLFLHGNPTSSYVWRNIIPHVAPTHRCIAPDLIGMGKSDKPDLGYFFDDHVRFMDAFIEALGLEEVVLVIHDWGSALGFHWAKRNPERVKGIAFMEFIRPIPTWDEWPEFARETFQAFRTTDVGRKLIIDQNVFIEGTLPMGVVRPLTEVEMDHYREPFLNPVDREPLWRFPNELPIAGQPANIVALVEEYMDWLHQSPVPKLLFWGTPGVLIPPAEAARLAKSLPNCKAVDIGPGLNLLQEDNPDLIGSEIARWLSTLEISG

SEQ ID NO: 2334 - protein, 277 aa, Synthetic construct
MFHYVDVGPRDGTPVLFLHGNPTSSYVWRNIIPHVAPTHRCIAPDLIGMGKSDKPDLGYFFDDHVRFMDAFIEALGLEEVVLVIHDWGSALGFHWAKRNPERVKGIAFMEFIRPIPTWDEWPEFARETFQAFRTTDVGRKLIIDQNVFIEGTLPMGVVRPLTEVEMDHYREPFLNPVDREPLWRFPNELPIAGAPANIVALVEEYMDWLHQSPVPKLLFWGTPGVLIPPAEAARLAKSLPNCKAVDIGPGLNLLQEDNPDLIGSEIARWLSTLEISG

SEQ ID NO: 2335 - protein, 277 aa, Synthetic construct
MFHYVDVGPRDGTPVLFLHGNPTSSYVWRNIIPHVAPTHRCIAPDLIGMGKSDKPDLGYFFDDHVRFMDAFIEALGLEEVVLVIHDWGSALGFHWAKRNPERVKGIAFMEFIRPIPTWDEWPEFARETFQAFRTTDVGRKLIIDQNVFIEGTLPMGVVRPLTEVEMDHYREPFLNPVDREPLWRFPNELPIAGTPANIVALVEEYMDWLHQSPVPKLLFWGTPGVLIPPAEAARLAKSLPNCKAVDIGPGLNLLQEDNPDLIGSEIARWLSTLEISG

SEQ ID NO: 2336 - protein, 277 aa, Synthetic construct
MFHYVDVGPRDGTPVLFLHGNPTSSYVWRNIIPHVAPTHRCIAPDLIGMGKSDKPDLGYFFDDHVRFMDAFIEALGLEEVVLVIHDWGSALGFHWAKRNPERVKGIAFMEFIRPIPTWDEWPEFARETFQAFRTTDVGRKLIIDQNVFIEGTLPMGVVRPLTEVEMDHYREPFLNPVDREPLWRFPNELPIAGKPANIVALVEEYMDWLHQSPVPKLLFWGTPGVLIPPAEAARLAKSLPNCKAVDIGPGLNLLQEDNPDLIGSEIARWLSTLEISG

SEQ ID NO: 2337 - protein, 277 aa, Synthetic construct
MFHYVDVGPRDGTPVLFLHGNPTSSYVWRNIIPHVAPTHRCIAPDLIGMGKSDKPDLGYFFDDHVRFMDAFIEALGLEEVVLVIHDWGSALGFHWAKRNPERVKGIAFMEFIRPIPTWDEWPEFARETFQAFRTTDVGRKLIIDQNVFIEGTLPMGVVRPLTEVEMDHYREPFLNPVDREPLWRFPNELPIAGSPANIVALVEEYMDWLHQSPVPKLLFWGTPGVLIPPAEAARLAKSLPNCKAVDIGPGLNLLQEDNPDLIGSEIARWLSTLEISG

SEQ ID NO: 2338 - protein, 277 aa, Synthetic construct
MFHYVDVGPRDGTPVLFLHGNPTSSYVWRNIIPHVAPTHRCIAPDLIGMGKSDKPDLGYFFDDHVRFMDAFIEALGLEEVVLVIHDWGSALGFHWAKRNPERVKGIAFMEFIRPIPTWDEWPEFARETFQAFRTTDVGRKLIIDQNVFIEGTLPMGVVRPLTEVEMDHYREPFLNPVDREPLWRFPNELPIAGEAANIVALVEEYMDWLHQSPVPKLLFWGTPGVLIPPAEAARLAKSLPNCKAVDIGPGLNLLQEDNPDLIGSEIARWLSTLEISG

SEQ ID NO: 2339 - protein, 277 aa, Synthetic construct
MFHYVDVGPRDGTPVLFLHGNPTSSYVWRNIIPHVAPTHRCIAPDLIGMGKSDKPDLGYFFDDHVRFMDAFIEALGLEEVVLVIHDWGSALGFHWAKRNPERVKGIAFMEFIRPIPTWDEWPEFARETFQAFRTTDVGRKLIIDQNVFIEGTLPMGVVRPLTEVEMDHYREPFLNPVDREPLWRFPNELPIAGESANIVALVEEYMDWLHQSPVPKLLFWGTPGVLIPPAEAARLAKSLPNCKAVDIGPGLNLLQEDNPDLIGSEIARWLSTLEISG

SEQ ID NO: 2340 - protein, 277 aa, Synthetic construct
MFHYVDVGPRDGTPVLFLHGNPTSSYVWRNIIPHVAPTHRCIAPDLIGMGKSDKPDLGYFFDDHVRFMDAFIEALGLEEVVLVIHDWGSALGFHWAKRNPERVKGIAFMEFIRPIPTWDEWPEFARETFQAFRTTDVGRKLIIDQNVFIEGTLPMGVVRPLTEVEMDHYREPFLNPVDREPLWRFPNELPIAGETANIVALVEEYMDWLHQSPVPKLLFWGTPGVLIPPAEAARLAKSLPNCKAVDIGPGLNLLQEDNPDLIGSEIARWLSTLEISG

SEQ ID NO: 2341 - protein, 277 aa, Synthetic construct
MFHYVDVGPRDGTPVLFLHGNPTSSYVWRNIIPHVAPTHRCIAPDLIGMGKSDKPDLGYFFDDHVRFMDAFIEALGLEEVVLVIHDWGSALGFHWAKRNPERVKGIAFMEFIRPIPTWDEWPEFARETFQAFRTTDVGRKLIIDQNVFIEGTLPMGVVRPLTEVEMDHYREPFLNPVDREPLWRFPNELPIAGEEANIVALVEEYMDWLHQSPVPKLLFWGTPGVLIPPAEAARLAKSLPNCKAVDIGPGLNLLQEDNPDLIGSEIARWLSTLEISG

SEQ ID NO: 2342 - protein, 277 aa, Synthetic construct
MFHYVDVGPRDGTPVLFLHGNPTSSYVWRNIIPHVAPTHRCIAPDLIGMGKSDKPDLGYFFDDHVRFMDAFIEALGLEEVVLVIHDWGSALGFHWAKRNPERVKGIAFMEFIRPIPTWDEWPEFARETFQAFRTTDVGRKLIIDQNVFIEGTLPMGVVRPLTEVEMDHYREPFLNPVDREPLWRFPNELPIAGEQANIVALVEEYMDWLHQSPVPKLLFWGTPGVLIPPAEAARLAKSLPNCKAVDIGPGLNLLQEDNPDLIGSEIARWLSTLEISG

SEQ ID NO: 2343 - protein, 277 aa, Synthetic construct
MFHYVDVGPRDGTPVLFLHGNPTSSYVWRNIIPHVAPTHRCIAPDLIGMGKSDKPDLGYFFDDHVRFMDAFIEALGLEEVVLVIHDWGSALGFHWAKRNPERVKGIAFMEFIRPIPTWDEWPEFARETFQAFRTTDVGRKLIIDQNVFIEGTLPMGVVRPLTEVEMDHYREPFLNPVDREPLWRFPNELPIAGEGANIVALVEEYMDWLHQSPVPKLLFWGTPGVLIPPAEAARLAKSLPNCKAVDIGPGLNLLQEDNPDLIGSEIARWLSTLEISG

SEQ ID NO: 2344 - protein, 277 aa, Synthetic construct
MFHYVDVGPRDGTPVLFLHGNPTSSYVWRNIIPHVAPTHRCIAPDLIGMGKSDKPDLGYFFDDHVRFMDAFIEALGLEEVVLVIHDWGSALGFHWAKRNPERVKGIAFMEFIRPIPTWDEWPEFARETFQAFRTTDVGRKLIIDQNVFIEGTLPMGVVRPLTEVEMDHYREPFLNPVDREPLWRFPNELPIAGEPENIVALVEEYMDWLHQSPVPKLLFWGTPGVLIPPAEAARLAKSLPNCKAVDIGPGLNLLQEDNPDLIGSEIARWLSTLEISG

SEQ ID NO: 2345 - protein, 277 aa, Synthetic construct
MFHYVDVGPRDGTPVLFLHGNPTSSYVWRNIIPHVAPTHRCIAPDLIGMGKSDKPDLGYFFDDHVRFMDAFIEALGLEEVVLVIHDWGSALGFHWAKRNPERVKGIAFMEFIRPIPTWDEWPEFARETFQAFRTTDVGRKLIIDQNVFIEGTLPMGVVRPLTEVEMDHYREPFLNPVDREPLWRFPNELPIAGEPDNIVALVEEYMDWLHQSPVPKLLFWGTPGVLIPPAEAARLAKSLPNCKAVDIGPGLNLLQEDNPDLIGSEIARWLSTLEISG

SEQ ID NO: 2346 - protein, 277 aa, Synthetic construct
MFHYVDVGPRDGTPVLFLHGNPTSSYVWRNIIPHVAPTHRCIAPDLIGMGKSDKPDLGYFFDDHVRFMDAFIEALGLEEVVLVIHDWGSALGFHWAKRNPERVKGIAFMEFIRPIPTWDEWPEFARETFQAFRTTDVGRKLIIDQNVFIEGTLPMGVVRPLTEVEMDHYREPFLNPVDREPLWRFPNELPIAGEPPNIVALVEEYMDWLHQSPVPKLLFWGTPGVLIPPAEAARLAKSLPNCKAVDIGPGLNLLQEDNPDLIGSEIARWLSTLEISG

SEQ ID NO: 2347 - protein, 277 aa, Synthetic construct
MFHYVDVGPRDGTPVLFLHGNPTSSYVWRNIIPHVAPTHRCIAPDLIGMGKSDKPDLGYFFDDHVRFMDAFIEALGLEEVVLVIHDWGSALGFHWAKRNPERVKGIAFMEFIRPIPTWDEWPEFARETFQAFRTTDVGRKLIIDQNVFIEGTLPMGVVRPLTEVEMDHYREPFLNPVDREPLWRFPNELPIAGEPSNIVALVEEYMDWLHQSPVPKLLFWGTPGVLIPPAEAARLAKSLPNCKAVDIGPGLNLLQEDNPDLIGSEIARWLSTLEISG

SEQ ID NO: 2348 - protein, 277 aa, Synthetic construct
MFHYVDVGPRDGTPVLFLHGNPTSSYVWRNIIPHVAPTHRCIAPDLIGMGKSDKPDLGYFFDDHVRFMDAFIEALGLEEVVLVIHDWGSALGFHWAKRNPERVKGIAFMEFIRPIPTWDEWPEFARETFQAFRTTDVGRKLIIDQNVFIEGTLPMGVVRPLTEVEMDHYREPFLNPVDREPLWRFPNELPIAGEPKNIVALVEEYMDWLHQSPVPKLLFWGTPGVLIPPAEAARLAKSLPNCKAVDIGPGLNLLQEDNPDLIGSEIARWLSTLEISG

SEQ ID NO: 2349 - protein, 277 aa, Synthetic construct
MFHYVDVGPRDGTPVLFLHGNPTSSYVWRNIIPHVAPTHRCIAPDLIGMGKSDKPDLGYFFDDHVRFMDAFIEALGLEEVVLVIHDWGSALGFHWAKRNPERVKGIAFMEFIRPIPTWDEWPEFARETFQAFRTTDVGRKLIIDQNVFIEGTLPMGVVRPLTEVEMDHYREPFLNPVDREPLWRFPNELPIAGEPQNIVALVEEYMDWLHQSPVPKLLFWGTPGVLIPPAEAARLAKSLPNCKAVDIGPGLNLLQEDNPDLIGSEIARWLSTLEISG

SEQ ID NO: 2350 - protein, 277 aa, Synthetic construct
MFHYVDVGPRDGTPVLFLHGNPTSSYVWRNIIPHVAPTHRCIAPDLIGMGKSDKPDLGYFFDDHVRFMDAFIEALGLEEVVLVIHDWGSALGFHWAKRNPERVKGIAFMEFIRPIPTWDEWPEFARETFQAFRTTDVGRKLIIDQNVFIEGTLPMGVVRPLTEVEMDHYREPFLNPVDREPLWRFPNELPIAGEPADIVALVEEYMDWLHQSPVPKLLFWGTPGVLIPPAEAARLAKSLPNCKAVDIGPGLNLLQEDNPDLIGSEIARWLSTLEISG

SEQ ID NO: 2351 - protein, 277 aa, Synthetic construct
MFHYVDVGPRDGTPVLFLHGNPTSSYVWRNIIPHVAPTHRCIAPDLIGMGKSDKPDLGYFFDDHVRFMDAFIEALGLEEVVLVIHDWGSALGFHWAKRNPERVKGIAFMEFIRPIPTWDEWPEFARETFQAFRTTDVGRKLIIDQNVFIEGTLPMGVVRPLTEVEMDHYREPFLNPVDREPLWRFPNELPIAGEPAEIVALVEEYMDWLHQSPVPKLLFWGTPGVLIPPAEAARLAKSLPNCKAVDIGPGLNLLQEDNPDLIGSEIARWLSTLEISG

SEQ ID NO: 2352 - protein, 277 aa, Synthetic construct
MFHYVDVGPRDGTPVLFLHGNPTSSYVWRNIIPHVAPTHRCIAPDLIGMGKSDKPDLGYFFDDHVRFMDAFIEALGLEEVVLVIHDWGSALGFHWAKRNPERVKGIAFMEFIRPIPTWDEWPEFARETFQAFRTTDVGRKLIIDQNVFIEGTLPMGVVRPLTEVEMDHYREPFLNPVDREPLWRFPNELPIAGEPAAIVALVEEYMDWLHQSPVPKLLFWGTPGVLIPPAEAARLAKSLPNCKAVDIGPGLNLLQEDNPDLIGSEIARWLSTLEISG

SEQ ID NO: 2353 - protein, 277 aa, Synthetic construct
MFHYVDVGPRDGTPVLFLHGNPTSSYVWRNIIPHVAPTHRCIAPDLIGMGKSDKPDLGYFFDDHVRFMDAFIEALGLEEVVLVIHDWGSALGFHWAKRNPERVKGIAFMEFIRPIPTWDEWPEFARETFQAFRTTDVGRKLIIDQNVFIEGTLPMGVVRPLTEVEMDHYREPFLNPVDREPLWRFPNELPIAGEPASIVALVEEYMDWLHQSPVPKLLFWGTPGVLIPPAEAARLAKSLPNCKAVDIGPGLNLLQEDNPDLIGSEIARWLSTLEISG

SEQ ID NO: 2354 - protein, 277 aa, Synthetic construct
MFHYVDVGPRDGTPVLFLHGNPTSSYVWRNIIPHVAPTHRCIAPDLIGMGKSDKPDLGYFFDDHVRFMDAFIEALGLEEVVLVIHDWGSALGFHWAKRNPERVKGIAFMEFIRPIPTWDEWPEFARETFQAFRTTDVGRKLIIDQNVFIEGTLPMGVVRPLTEVEMDHYREPFLNPVDREPLWRFPNELPIAGEPAHIVALVEEYMDWLHQSPVPKLLFWGTPGVLIPPAEAARLAKSLPNCKAVDIGPGLNLLQEDNPDLIGSEIARWLSTLEISG

SEQ ID NO: 2355 - protein, 277 aa, Synthetic construct
MFHYVDVGPRDGTPVLFLHGNPTSSYVWRNIIPHVAPTHRCIAPDLIGMGKSDKPDLGYFFDDHVRFMDAFIEALGLEEVVLVIHDWGSALGFHWAKRNPERVKGIAFMEFIRPIPTWDEWPEFARETFQAFRTTDVGRKLIIDQNVFIEGTLPMGVVRPLTEVEMDHYREPFLNPVDREPLWRFPNELPIAGEPAQIVALVEEYMDWLHQSPVPKLLFWGTPGVLIPPAEAARLAKSLPNCKAVDIGPGLNLLQEDNPDLIGSEIARWLSTLEISG

SEQ ID NO: 2356 - protein, 277 aa, Synthetic construct
MFHYVDVGPRDGTPVLFLHGNPTSSYVWRNIIPHVAPTHRCIAPDLIGMGKSDKPDLGYFFDDHVRFMDAFIEALGLEEVVLVIHDWGSALGFHWAKRNPERVKGIAFMEFIRPIPTWDEWPEFARETFQAFRTTDVGRKLIIDQNVFIEGTLPMGVVRPLTEVEMDHYREPFLNPVDREPLWRFPNELPIAGEPANVVALVEEYMDWLHQSPVPKLLFWGTPGVLIPPAEAARLAKSLPNCKAVDIGPGLNLLQEDNPDLIGSEIARWLSTLEISG

SEQ ID NO: 2357 - protein, 277 aa, Synthetic construct
MFHYVDVGPRDGTPVLFLHGNPTSSYVWRNIIPHVAPTHRCIAPDLIGMGKSDKPDLGYFFDDHVRFMDAFIEALGLEEVVLVIHDWGSALGFHWAKRNPERVKGIAFMEFIRPIPTWDEWPEFARETFQAFRTTDVGRKLIIDQNVFIEGTLPMGVVRPLTEVEMDHYREPFLNPVDREPLWRFPNELPIAGEPANTVALVEEYMDWLHQSPVPKLLFWGTPGVLIPPAEAARLAKSLPNCKAVDIGPGLNLLQEDNPDLIGSEIARWLSTLEISG

SEQ ID NO: 2358 - protein, 277 aa, Synthetic construct
MFHYVDVGPRDGTPVLFLHGNPTSSYVWRNIIPHVAPTHRCIAPDLIGMGKSDKPDLGYFFDDHVRFMDAFIEALGLEEVVLVIHDWGSALGFHWAKRNPERVKGIAFMEFIRPIPTWDEWPEFARETFQAFRTTDVGRKLIIDQNVFIEGTLPMGVVRPLTEVEMDHYREPFLNPVDREPLWRFPNELPIAGEPANAVALVEEYMDWLHQSPVPKLLFWGTPGVLIPPAEAARLAKSLPNCKAVDIGPGLNLLQEDNPDLIGSEIARWLSTLEISG

SEQ ID NO: 2359 - protein, 277 aa, Synthetic construct
MFHYVDVGPRDGTPVLFLHGNPTSSYVWRNIIPHVAPTHRCIAPDLIGMGKSDKPDLGYFFDDHVRFMDAFIEALGLEEVVLVIHDWGSALGFHWAKRNPERVKGIAFMEFIRPIPTWDEWPEFARETFQAFRTTDVGRKLIIDQNVFIEGTLPMGVVRPLTEVEMDHYREPFLNPVDREPLWRFPNELPIAGEPANLVALVEEYMDWLHQSPVPKLLFWGTPGVLIPPAEAARLAKSLPNCKAVDIGPGLNLLQEDNPDLIGSEIARWLSTLEISG

SEQ ID NO: 2360 - protein, 277 aa, Synthetic construct
MFHYVDVGPRDGTPVLFLHGNPTSSYVWRNIIPHVAPTHRCIAPDLIGMGKSDKPDLGYFFDDHVRFMDAFIEALGLEEVVLVIHDWGSALGFHWAKRNPERVKGIAFMEFIRPIPTWDEWPEFARETFQAFRTTDVGRKLIIDQNVFIEGTLPMGVVRPLTEVEMDHYREPFLNPVDREPLWRFPNELPIAGEPANSVALVEEYMDWLHQSPVPKLLFWGTPGVLIPPAEAARLAKSLPNCKAVDIGPGLNLLQEDNPDLIGSEIARWLSTLEISG

SEQ ID NO: 2361 - protein, 277 aa, Synthetic construct
MFHYVDVGPRDGTPVLFLHGNPTSSYVWRNIIPHVAPTHRCIAPDLIGMGKSDKPDLGYFFDDHVRFMDAFIEALGLEEVVLVIHDWGSALGFHWAKRNPERVKGIAFMEFIRPIPTWDEWPEFARETFQAFRTTDVGRKLIIDQNVFIEGTLPMGVVRPLTEVEMDHYREPFLNPVDREPLWRFPNELPIAGEPANMVALVEEYMDWLHQSPVPKLLFWGTPGVLIPPAEAARLAKSLPNCKAVDIGPGLNLLQEDNPDLIGSEIARWLSTLEISG

SEQ ID NO: 2362 - protein, 277 aa, Synthetic construct
MFHYVDVGPRDGTPVLFLHGNPTSSYVWRNIIPHVAPTHRCIAPDLIGMGKSDKPDLGYFFDDHVRFMDAFIEALGLEEVVLVIHDWGSALGFHWAKRNPERVKGIAFMEFIRPIPTWDEWPEFARETFQAFRTTDVGRKLIIDQNVFIEGTLPMGVVRPLTEVEMDHYREPFLNPVDREPLWRFPNELPIAGEPANITALVEEYMDWLHQSPVPKLLFWGTPGVLIPPAEAARLAKSLPNCKAVDIGPGLNLLQEDNPDLIGSEIARWLSTLEISG

SEQ ID NO: 2363 - protein, 277 aa, Synthetic construct
MFHYVDVGPRDGTPVLFLHGNPTSSYVWRNIIPHVAPTHRCIAPDLIGMGKSDKPDLGYFFDDHVRFMDAFIEALGLEEVVLVIHDWGSALGFHWAKRNPERVKGIAFMEFIRPIPTWDEWPEFARETFQAFRTTDVGRKLIIDQNVFIEGTLPMGVVRPLTEVEMDHYREPFLNPVDREPLWRFPNELPIAGEPANIAALVEEYMDWLHQSPVPKLLFWGTPGVLIPPAEAARLAKSLPNCKAVDIGPGLNLLQEDNPDLIGSEIARWLSTLEISG

SEQ ID NO: 2364 - protein, 277 aa, Synthetic construct
MFHYVDVGPRDGTPVLFLHGNPTSSYVWRNIIPHVAPTHRCIAPDLIGMGKSDKPDLGYFFDDHVRFMDAFIEALGLEEVVLVIHDWGSALGFHWAKRNPERVKGIAFMEFIRPIPTWDEWPEFARETFQAFRTTDVGRKLIIDQNVFIEGTLPMGVVRPLTEVEMDHYREPFLNPVDREPLWRFPNELPIAGEPANIIALVEEYMDWLHQSPVPKLLFWGTPGVLIPPAEAARLAKSLPNCKAVDIGPGLNLLQEDNPDLIGSEIARWLSTLEISG

SEQ ID NO: 2365 - protein, 277 aa, Synthetic construct
MFHYVDVGPRDGTPVLFLHGNPTSSYVWRNIIPHVAPTHRCIAPDLIGMGKSDKPDLGYFFDDHVRFMDAFIEALGLEEVVLVIHDWGSALGFHWAKRNPERVKGIAFMEFIRPIPTWDEWPEFARETFQAFRTTDVGRKLIIDQNVFIEGTLPMGVVRPLTEVEMDHYREPFLNPVDREPLWRFPNELPIAGEPANILALVEEYMDWLHQSPVPKLLFWGTPGVLIPPAEAARLAKSLPNCKAVDIGPGLNLLQEDNPDLIGSEIARWLSTLEISG

SEQ ID NO: 2366 - protein, 277 aa, Synthetic construct
MFHYVDVGPRDGTPVLFLHGNPTSSYVWRNIIPHVAPTHRCIAPDLIGMGKSDKPDLGYFFDDHVRFMDAFIEALGLEEVVLVIHDWGSALGFHWAKRNPERVKGIAFMEFIRPIPTWDEWPEFARETFQAFRTTDVGRKLIIDQNVFIEGTLPMGVVRPLTEVEMDHYREPFLNPVDREPLWRFPNELPIAGEPANISALVEEYMDWLHQSPVPKLLFWGTPGVLIPPAEAARLAKSLPNCKAVDIGPGLNLLQEDNPDLIGSEIARWLSTLEISG

SEQ ID NO: 2367 - protein, 277 aa, Synthetic construct
MFHYVDVGPRDGTPVLFLHGNPTSSYVWRNIIPHVAPTHRCIAPDLIGMGKSDKPDLGYFFDDHVRFMDAFIEALGLEEVVLVIHDWGSALGFHWAKRNPERVKGIAFMEFIRPIPTWDEWPEFARETFQAFRTTDVGRKLIIDQNVFIEGTLPMGVVRPLTEVEMDHYREPFLNPVDREPLWRFPNELPIAGEPANIRALVEEYMDWLHQSPVPKLLFWGTPGVLIPPAEAARLAKSLPNCKAVDIGPGLNLLQEDNPDLIGSEIARWLSTLEISG

SEQ ID NO: 2368 - protein, 277 aa, Synthetic construct
MFHYVDVGPRDGTPVLFLHGNPTSSYVWRNIIPHVAPTHRCIAPDLIGMGKSDKPDLGYFFDDHVRFMDAFIEALGLEEVVLVIHDWGSALGFHWAKRNPERVKGIAFMEFIRPIPTWDEWPEFARETFQAFRTTDVGRKLIIDQNVFIEGTLPMGVVRPLTEVEMDHYREPFLNPVDREPLWRFPNELPIAGEPANIVRLVEEYMDWLHQSPVPKLLFWGTPGVLIPPAEAARLAKSLPNCKAVDIGPGLNLLQEDNPDLIGSEIARWLSTLEISG

SEQ ID NO: 2369 - protein, 277 aa, Synthetic construct
MFHYVDVGPRDGTPVLFLHGNPTSSYVWRNIIPHVAPTHRCIAPDLIGMGKSDKPDLGYFFDDHVRFMDAFIEALGLEEVVLVIHDWGSALGFHWAKRNPERVKGIAFMEFIRPIPTWDEWPEFARETFQAFRTTDVGRKLIIDQNVFIEGTLPMGVVRPLTEVEMDHYREPFLNPVDREPLWRFPNELPIAGEPANIVKLVEEYMDWLHQSPVPKLLFWGTPGVLIPPAEAARLAKSLPNCKAVDIGPGLNLLQEDNPDLIGSEIARWLSTLEISG

SEQ ID NO: 2370 - protein, 277 aa, Synthetic construct
MFHYVDVGPRDGTPVLFLHGNPTSSYVWRNIIPHVAPTHRCIAPDLIGMGKSDKPDLGYFFDDHVRFMDAFIEALGLEEVVLVIHDWGSALGFHWAKRNPERVKGIAFMEFIRPIPTWDEWPEFARETFQAFRTTDVGRKLIIDQNVFIEGTLPMGVVRPLTEVEMDHYREPFLNPVDREPLWRFPNELPIAGEPANIVELVEEYMDWLHQSPVPKLLFWGTPGVLIPPAEAARLAKSLPNCKAVDIGPGLNLLQEDNPDLIGSEIARWLSTLEISG

SEQ ID NO: 2371 - protein, 277 aa, Synthetic construct
MFHYVDVGPRDGTPVLFLHGNPTSSYVWRNIIPHVAPTHRCIAPDLIGMGKSDKPDLGYFFDDHVRFMDAFIEALGLEEVVLVIHDWGSALGFHWAKRNPERVKGIAFMEFIRPIPTWDEWPEFARETFQAFRTTDVGRKLIIDQNVFIEGTLPMGVVRPLTEVEMDHYREPFLNPVDREPLWRFPNELPIAGEPANIVPLVEEYMDWLHQSPVPKLLFWGTPGVLIPPAEAARLAKSLPNCKAVDIGPGLNLLQEDNPDLIGSEIARWLSTLEISG

SEQ ID NO: 2372 - protein, 277 aa, Synthetic construct
MFHYVDVGPRDGTPVLFLHGNPTSSYVWRNIIPHVAPTHRCIAPDLIGMGKSDKPDLGYFFDDHVRFMDAFIEALGLEEVVLVIHDWGSALGFHWAKRNPERVKGIAFMEFIRPIPTWDEWPEFARETFQAFRTTDVGRKLIIDQNVFIEGTLPMGVVRPLTEVEMDHYREPFLNPVDREPLWRFPNELPIAGEPANIVSLVEEYMDWLHQSPVPKLLFWGTPGVLIPPAEAARLAKSLPNCKAVDIGPGLNLLQEDNPDLIGSEIARWLSTLEISG

SEQ ID NO: 2373 - protein, 277 aa, Synthetic construct
MFHYVDVGPRDGTPVLFLHGNPTSSYVWRNIIPHVAPTHRCIAPDLIGMGKSDKPDLGYFFDDHVRFMDAFIEALGLEEVVLVIHDWGSALGFHWAKRNPERVKGIAFMEFIRPIPTWDEWPEFARETFQAFRTTDVGRKLIIDQNVFIEGTLPMGVVRPLTEVEMDHYREPFLNPVDREPLWRFPNELPIAGEPANIVGLVEEYMDWLHQSPVPKLLFWGTPGVLIPPAEAARLAKSLPNCKAVDIGPGLNLLQEDNPDLIGSEIARWLSTLEISG

SEQ ID NO: 2374 - protein, 277 aa, Synthetic construct
MFHYVDVGPRDGTPVLFLHGNPTSSYVWRNIIPHVAPTHRCIAPDLIGMGKSDKPDLGYFFDDHVRFMDAFIEALGLEEVVLVIHDWGSALGFHWAKRNPERVKGIAFMEFIRPIPTWDEWPEFARETFQAFRTTDVGRKLIIDQNVFIEGTLPMGVVRPLTEVEMDHYREPFLNPVDREPLWRFPNELPIAGEPANIVAIVEEYMDWLHQSPVPKLLFWGTPGVLIPPAEAARLAKSLPNCKAVDIGPGLNLLQEDNPDLIGSEIARWLSTLEISG

SEQ ID NO: 2375 - protein, 277 aa, Synthetic construct
MFHYVDVGPRDGTPVLFLHGNPTSSYVWRNIIPHVAPTHRCIAPDLIGMGKSDKPDLGYFFDDHVRFMDAFIEALGLEEVVLVIHDWGSALGFHWAKRNPERVKGIAFMEFIRPIPTWDEWPEFARETFQAFRTTDVGRKLIIDQNVFIEGTLPMGVVRPLTEVEMDHYREPFLNPVDREPLWRFPNELPIAGEPANIVAVVEEYMDWLHQSPVPKLLFWGTPGVLIPPAEAARLAKSLPNCKAVDIGPGLNLLQEDNPDLIGSEIARWLSTLEISG

SEQ ID NO: 2376 - protein, 277 aa, Synthetic construct
MFHYVDVGPRDGTPVLFLHGNPTSSYVWRNIIPHVAPTHRCIAPDLIGMGKSDKPDLGYFFDDHVRFMDAFIEALGLEEVVLVIHDWGSALGFHWAKRNPERVKGIAFMEFIRPIPTWDEWPEFARETFQAFRTTDVGRKLIIDQNVFIEGTLPMGVVRPLTEVEMDHYREPFLNPVDREPLWRFPNELPIAGEPANIVARVEEYMDWLHQSPVPKLLFWGTPGVLIPPAEAARLAKSLPNCKAVDIGPGLNLLQEDNPDLIGSEIARWLSTLEISG

SEQ ID NO: 2377 - protein, 277 aa, Synthetic construct
MFHYVDVGPRDGTPVLFLHGNPTSSYVWRNIIPHVAPTHRCIAPDLIGMGKSDKPDLGYFFDDHVRFMDAFIEALGLEEVVLVIHDWGSALGFHWAKRNPERVKGIAFMEFIRPIPTWDEWPEFARETFQAFRTTDVGRKLIIDQNVFIEGTLPMGVVRPLTEVEMDHYREPFLNPVDREPLWRFPNELPIAGEPANIVAAVEEYMDWLHQSPVPKLLFWGTPGVLIPPAEAARLAKSLPNCKAVDIGPGLNLLQEDNPDLIGSEIARWLSTLEISG

SEQ ID NO: 2378 - protein, 277 aa, Synthetic construct
MFHYVDVGPRDGTPVLFLHGNPTSSYVWRNIIPHVAPTHRCIAPDLIGMGKSDKPDLGYFFDDHVRFMDAFIEALGLEEVVLVIHDWGSALGFHWAKRNPERVKGIAFMEFIRPIPTWDEWPEFARETFQAFRTTDVGRKLIIDQNVFIEGTLPMGVVRPLTEVEMDHYREPFLNPVDREPLWRFPNELPIAGEPANIVATVEEYMDWLHQSPVPKLLFWGTPGVLIPPAEAARLAKSLPNCKAVDIGPGLNLLQEDNPDLIGSEIARWLSTLEISG

SEQ ID NO: 2379 - protein, 277 aa, Synthetic construct
MFHYVDVGPRDGTPVLFLHGNPTSSYVWRNIIPHVAPTHRCIAPDLIGMGKSDKPDLGYFFDDHVRFMDAFIEALGLEEVVLVIHDWGSALGFHWAKRNPERVKGIAFMEFIRPIPTWDEWPEFARETFQAFRTTDVGRKLIIDQNVFIEGTLPMGVVRPLTEVEMDHYREPFLNPVDREPLWRFPNELPIAGEPANIVAKVEEYMDWLHQSPVPKLLFWGTPGVLIPPAEAARLAKSLPNCKAVDIGPGLNLLQEDNPDLIGSEIARWLSTLEISG

SEQ ID NO: 2380 - protein, 277 aa, Synthetic construct
MFHYVDVGPRDGTPVLFLHGNPTSSYVWRNIIPHVAPTHRCIAPDLIGMGKSDKPDLGYFFDDHVRFMDAFIEALGLEEVVLVIHDWGSALGFHWAKRNPERVKGIAFMEFIRPIPTWDEWPEFARETFQAFRTTDVGRKLIIDQNVFIEGTLPMGVVRPLTEVEMDHYREPFLNPVDREPLWRFPNELPIAGEPANIVALIEEYMDWLHQSPVPKLLFWGTPGVLIPPAEAARLAKSLPNCKAVDIGPGLNLLQEDNPDLIGSEIARWLSTLEISG

SEQ ID NO: 2381 - protein, 277 aa, Synthetic construct
MFHYVDVGPRDGTPVLFLHGNPTSSYVWRNIIPHVAPTHRCIAPDLIGMGKSDKPDLGYFFDDHVRFMDAFIEALGLEEVVLVIHDWGSALGFHWAKRNPERVKGIAFMEFIRPIPTWDEWPEFARETFQAFRTTDVGRKLIIDQNVFIEGTLPMGVVRPLTEVEMDHYREPFLNPVDREPLWRFPNELPIAGEPANIVALTEEYMDWLHQSPVPKLLFWGTPGVLIPPAEAARLAKSLPNCKAVDIGPGLNLLQEDNPDLIGSEIARWLSTLEISG

SEQ ID NO: 2382 - protein, 277 aa, Synthetic construct
MFHYVDVGPRDGTPVLFLHGNPTSSYVWRNIIPHVAPTHRCIAPDLIGMGKSDKPDLGYFFDDHVRFMDAFIEALGLEEVVLVIHDWGSALGFHWAKRNPERVKGIAFMEFIRPIPTWDEWPEFARETFQAFRTTDVGRKLIIDQNVFIEGTLPMGVVRPLTEVEMDHYREPFLNPVDREPLWRFPNELPIAGEPANIVALAEEYMDWLHQSPVPKLLFWGTPGVLIPPAEAARLAKSLPNCKAVDIGPGLNLLQEDNPDLIGSEIARWLSTLEISG

SEQ ID NO: 2383 - protein, 277 aa, Synthetic construct
MFHYVDVGPRDGTPVLFLHGNPTSSYVWRNIIPHVAPTHRCIAPDLIGMGKSDKPDLGYFFDDHVRFMDAFIEALGLEEVVLVIHDWGSALGFHWAKRNPERVKGIAFMEFIRPIPTWDEWPEFARETFQAFRTTDVGRKLIIDQNVFIEGTLPMGVVRPLTEVEMDHYREPFLNPVDREPLWRFPNELPIAGEPANIVALLEEYMDWLHQSPVPKLLFWGTPGVLIPPAEAARLAKSLPNCKAVDIGPGLNLLQEDNPDLIGSEIARWLSTLEISG

SEQ ID NO: 2384 - protein, 277 aa, Synthetic construct
MFHYVDVGPRDGTPVLFLHGNPTSSYVWRNIIPHVAPTHRCIAPDLIGMGKSDKPDLGYFFDDHVRFMDAFIEALGLEEVVLVIHDWGSALGFHWAKRNPERVKGIAFMEFIRPIPTWDEWPEFARETFQAFRTTDVGRKLIIDQNVFIEGTLPMGVVRPLTEVEMDHYREPFLNPVDREPLWRFPNELPIAGEPANIVALMEEYMDWLHQSPVPKLLFWGTPGVLIPPAEAARLAKSLPNCKAVDIGPGLNLLQEDNPDLIGSEIARWLSTLEISG

SEQ ID NO: 2385 - protein, 277 aa, Synthetic construct
MFHYVDVGPRDGTPVLFLHGNPTSSYVWRNIIPHVAPTHRCIAPDLIGMGKSDKPDLGYFFDDHVRFMDAFIEALGLEEVVLVIHDWGSALGFHWAKRNPERVKGIAFMEFIRPIPTWDEWPEFARETFQAFRTTDVGRKLIIDQNVFIEGTLPMGVVRPLTEVEMDHYREPFLNPVDREPLWRFPNELPIAGEPANIVALSEEYMDWLHQSPVPKLLFWGTPGVLIPPAEAARLAKSLPNCKAVDIGPGLNLLQEDNPDLIGSEIARWLSTLEISG

SEQ ID NO: 2386 - protein, 277 aa, Synthetic construct
MFHYVDVGPRDGTPVLFLHGNPTSSYVWRNIIPHVAPTHRCIAPDLIGMGKSDKPDLGYFFDDHVRFMDAFIEALGLEEVVLVIHDWGSALGFHWAKRNPERVKGIAFMEFIRPIPTWDEWPEFARETFQAFRTTDVGRKLIIDQNVFIEGTLPMGVVRPLTEVEMDHYREPFLNPVDREPLWRFPNELPIAGEPANIVALVDEYMDWLHQSPVPKLLFWGTPGVLIPPAEAARLAKSLPNCKAVDIGPGLNLLQEDNPDLIGSEIARWLSTLEISG

SEQ ID NO: 2387 - protein, 277 aa, Synthetic construct
MFHYVDVGPRDGTPVLFLHGNPTSSYVWRNIIPHVAPTHRCIAPDLIGMGKSDKPDLGYFFDDHVRFMDAFIEALGLEEVVLVIHDWGSALGFHWAKRNPERVKGIAFMEFIRPIPTWDEWPEFARETFQAFRTTDVGRKLIIDQNVFIEGTLPMGVVRPLTEVEMDHYREPFLNPVDREPLWRFPNELPIAGEPANIVALVAEYMDWLHQSPVPKLLFWGTPGVLIPPAEAARLAKSLPNCKAVDIGPGLNLLQEDNPDLIGSEIARWLSTLEISG

SEQ ID NO: 2388 - protein, 277 aa, Synthetic construct
MFHYVDVGPRDGTPVLFLHGNPTSSYVWRNIIPHVAPTHRCIAPDLIGMGKSDKPDLGYFFDDHVRFMDAFIEALGLEEVVLVIHDWGSALGFHWAKRNPERVKGIAFMEFIRPIPTWDEWPEFARETFQAFRTTDVGRKLIIDQNVFIEGTLPMGVVRPLTEVEMDHYREPFLNPVDREPLWRFPNELPIAGEPANIVALVQEYMDWLHQSPVPKLLFWGTPGVLIPPAEAARLAKSLPNCKAVDIGPGLNLLQEDNPDLIGSEIARWLSTLEISG

SEQ ID NO: 2389 - protein, 277 aa, Synthetic construct
MFHYVDVGPRDGTPVLFLHGNPTSSYVWRNIIPHVAPTHRCIAPDLIGMGKSDKPDLGYFFDDHVRFMDAFIEALGLEEVVLVIHDWGSALGFHWAKRNPERVKGIAFMEFIRPIPTWDEWPEFARETFQAFRTTDVGRKLIIDQNVFIEGTLPMGVVRPLTEVEMDHYREPFLNPVDREPLWRFPNELPIAGEPANIVALVNEYMDWLHQSPVPKLLFWGTPGVLIPPAEAARLAKSLPNCKAVDIGPGLNLLQEDNPDLIGSEIARWLSTLEISG

SEQ ID NO: 2390 - protein, 277 aa, Synthetic construct
MFHYVDVGPRDGTPVLFLHGNPTSSYVWRNIIPHVAPTHRCIAPDLIGMGKSDKPDLGYFFDDHVRFMDAFIEALGLEEVVLVIHDWGSALGFHWAKRNPERVKGIAFMEFIRPIPTWDEWPEFARETFQAFRTTDVGRKLIIDQNVFIEGTLPMGVVRPLTEVEMDHYREPFLNPVDREPLWRFPNELPIAGEPANIVALVGEYMDWLHQSPVPKLLFWGTPGVLIPPAEAARLAKSLPNCKAVDIGPGLNLLQEDNPDLIGSEIARWLSTLEISG

SEQ ID NO: 2391 - protein, 277 aa, Synthetic construct
MFHYVDVGPRDGTPVLFLHGNPTSSYVWRNIIPHVAPTHRCIAPDLIGMGKSDKPDLGYFFDDHVRFMDAFIEALGLEEVVLVIHDWGSALGFHWAKRNPERVKGIAFMEFIRPIPTWDEWPEFARETFQAFRTTDVGRKLIIDQNVFIEGTLPMGVVRPLTEVEMDHYREPFLNPVDREPLWRFPNELPIAGEPANIVALVREYMDWLHQSPVPKLLFWGTPGVLIPPAEAARLAKSLPNCKAVDIGPGLNLLQEDNPDLIGSEIARWLSTLEISG

SEQ ID NO: 2392 - protein, 277 aa, Synthetic construct
MFHYVDVGPRDGTPVLFLHGNPTSSYVWRNIIPHVAPTHRCIAPDLIGMGKSDKPDLGYFFDDHVRFMDAFIEALGLEEVVLVIHDWGSALGFHWAKRNPERVKGIAFMEFIRPIPTWDEWPEFARETFQAFRTTDVGRKLIIDQNVFIEGTLPMGVVRPLTEVEMDHYREPFLNPVDREPLWRFPNELPIAGEPANIVALVEAYMDWLHQSPVPKLLFWGTPGVLIPPAEAARLAKSLPNCKAVDIGPGLNLLQEDNPDLIGSEIARWLSTLEISG

SEQ ID NO: 2393 - protein, 277 aa, Synthetic construct
MFHYVDVGPRDGTPVLFLHGNPTSSYVWRNIIPHVAPTHRCIAPDLIGMGKSDKPDLGYFFDDHVRFMDAFIEALGLEEVVLVIHDWGSALGFHWAKRNPERVKGIAFMEFIRPIPTWDEWPEFARETFQAFRTTDVGRKLIIDQNVFIEGTLPMGVVRPLTEVEMDHYREPFLNPVDREPLWRFPNELPIAGEPANIVALVERYMDWLHQSPVPKLLFWGTPGVLIPPAEAARLAKSLPNCKAVDIGPGLNLLQEDNPDLIGSEIARWLSTLEISG

SEQ ID NO: 2394 - protein, 277 aa, Synthetic construct
MFHYVDVGPRDGTPVLFLHGNPTSSYVWRNIIPHVAPTHRCIAPDLIGMGKSDKPDLGYFFDDHVRFMDAFIEALGLEEVVLVIHDWGSALGFHWAKRNPERVKGIAFMEFIRPIPTWDEWPEFARETFQAFRTTDVGRKLIIDQNVFIEGTLPMGVVRPLTEVEMDHYREPFLNPVDREPLWRFPNELPIAGEPANIVALVESYMDWLHQSPVPKLLFWGTPGVLIPPAEAARLAKSLPNCKAVDIGPGLNLLQEDNPDLIGSEIARWLSTLEISG

SEQ ID NO: 2395 - protein, 277 aa, Synthetic construct
MFHYVDVGPRDGTPVLFLHGNPTSSYVWRNIIPHVAPTHRCIAPDLIGMGKSDKPDLGYFFDDHVRFMDAFIEALGLEEVVLVIHDWGSALGFHWAKRNPERVKGIAFMEFIRPIPTWDEWPEFARETFQAFRTTDVGRKLIIDQNVFIEGTLPMGVVRPLTEVEMDHYREPFLNPVDREPLWRFPNELPIAGEPANIVALVEGYMDWLHQSPVPKLLFWGTPGVLIPPAEAARLAKSLPNCKAVDIGPGLNLLQEDNPDLIGSEIARWLSTLEISG

SEQ ID NO: 2396 - protein, 277 aa, Synthetic construct
MFHYVDVGPRDGTPVLFLHGNPTSSYVWRNIIPHVAPTHRCIAPDLIGMGKSDKPDLGYFFDDHVRFMDAFIEALGLEEVVLVIHDWGSALGFHWAKRNPERVKGIAFMEFIRPIPTWDEWPEFARETFQAFRTTDVGRKLIIDQNVFIEGTLPMGVVRPLTEVEMDHYREPFLNPVDREPLWRFPNELPIAGEPANIVALVEDYMDWLHQSPVPKLLFWGTPGVLIPPAEAARLAKSLPNCKAVDIGPGLNLLQEDNPDLIGSEIARWLSTLEISG

SEQ ID NO: 2397 - protein, 277 aa, Synthetic construct
MFHYVDVGPRDGTPVLFLHGNPTSSYVWRNIIPHVAPTHRCIAPDLIGMGKSDKPDLGYFFDDHVRFMDAFIEALGLEEVVLVIHDWGSALGFHWAKRNPERVKGIAFMEFIRPIPTWDEWPEFARETFQAFRTTDVGRKLIIDQNVFIEGTLPMGVVRPLTEVEMDHYREPFLNPVDREPLWRFPNELPIAGEPANIVALVEQYMDWLHQSPVPKLLFWGTPGVLIPPAEAARLAKSLPNCKAVDIGPGLNLLQEDNPDLIGSEIARWLSTLEISG

SEQ ID NO: 2398 - protein, 277 aa, Synthetic construct
MFHYVDVGPRDGTPVLFLHGNPTSSYVWRNIIPHVAPTHRCIAPDLIGMGKSDKPDLGYFFDDHVRFMDAFIEALGLEEVVLVIHDWGSALGFHWAKRNPERVKGIAFMEFIRPIPTWDEWPEFARETFQAFRTTDVGRKLIIDQNVFIEGTLPMGVVRPLTEVEMDHYREPFLNPVDREPLWRFPNELPIAGEPANIVALVEENMDWLHQSPVPKLLFWGTPGVLIPPAEAARLAKSLPNCKAVDIGPGLNLLQEDNPDLIGSEIARWLSTLEISG

SEQ ID NO: 2399 - protein, 277 aa, Synthetic construct
MFHYVDVGPRDGTPVLFLHGNPTSSYVWRNIIPHVAPTHRCIAPDLIGMGKSDKPDLGYFFDDHVRFMDAFIEALGLEEVVLVIHDWGSALGFHWAKRNPERVKGIAFMEFIRPIPTWDEWPEFARETFQAFRTTDVGRKLIIDQNVFIEGTLPMGVVRPLTEVEMDHYREPFLNPVDREPLWRFPNELPIAGEPANIVALVEEHMDWLHQSPVPKLLFWGTPGVLIPPAEAARLAKSLPNCKAVDIGPGLNLLQEDNPDLIGSEIARWLSTLEISG

SEQ ID NO: 2400 - protein, 277 aa, Synthetic construct
MFHYVDVGPRDGTPVLFLHGNPTSSYVWRNIIPHVAPTHRCIAPDLIGMGKSDKPDLGYFFDDHVRFMDAFIEALGLEEVVLVIHDWGSALGFHWAKRNPERVKGIAFMEFIRPIPTWDEWPEFARETFQAFRTTDVGRKLIIDQNVFIEGTLPMGVVRPLTEVEMDHYREPFLNPVDREPLWRFPNELPIAGEPANIVALVEESMDWLHQSPVPKLLFWGTPGVLIPPAEAARLAKSLPNCKAVDIGPGLNLLQEDNPDLIGSEIARWLSTLEISG

SEQ ID NO: 2401 - protein, 277 aa, Synthetic construct
MFHYVDVGPRDGTPVLFLHGNPTSSYVWRNIIPHVAPTHRCIAPDLIGMGKSDKPDLGYFFDDHVRFMDAFIEALGLEEVVLVIHDWGSALGFHWAKRNPERVKGIAFMEFIRPIPTWDEWPEFARETFQAFRTTDVGRKLIIDQNVFIEGTLPMGVVRPLTEVEMDHYREPFLNPVDREPLWRFPNELPIAGEPANIVALVEEFMDWLHQSPVPKLLFWGTPGVLIPPAEAARLAKSLPNCKAVDIGPGLNLLQEDNPDLIGSEIARWLSTLEISG

SEQ ID NO: 2402 - protein, 277 aa, Synthetic construct
MFHYVDVGPRDGTPVLFLHGNPTSSYVWRNIIPHVAPTHRCIAPDLIGMGKSDKPDLGYFFDDHVRFMDAFIEALGLEEVVLVIHDWGSALGFHWAKRNPERVKGIAFMEFIRPIPTWDEWPEFARETFQAFRTTDVGRKLIIDQNVFIEGTLPMGVVRPLTEVEMDHYREPFLNPVDREPLWRFPNELPIAGEPANIVALVEETMDWLHQSPVPKLLFWGTPGVLIPPAEAARLAKSLPNCKAVDIGPGLNLLQEDNPDLIGSEIARWLSTLEISG

SEQ ID NO: 2403 - protein, 277 aa, Synthetic construct
MFHYVDVGPRDGTPVLFLHGNPTSSYVWRNIIPHVAPTHRCIAPDLIGMGKSDKPDLGYFFDDHVRFMDAFIEALGLEEVVLVIHDWGSALGFHWAKRNPERVKGIAFMEFIRPIPTWDEWPEFARETFQAFRTTDVGRKLIIDQNVFIEGTLPMGVVRPLTEVEMDHYREPFLNPVDREPLWRFPNELPIAGEPANIVALVEEAMDWLHQSPVPKLLFWGTPGVLIPPAEAARLAKSLPNCKAVDIGPGLNLLQEDNPDLIGSEIARWLSTLEISG

SEQ ID NO: 2404 - protein, 277 aa, Synthetic construct
MFHYVDVGPRDGTPVLFLHGNPTSSYVWRNIIPHVAPTHRCIAPDLIGMGKSDKPDLGYFFDDHVRFMDAFIEALGLEEVVLVIHDWGSALGFHWAKRNPERVKGIAFMEFIRPIPTWDEWPEFARETFQAFRTTDVGRKLIIDQNVFIEGTLPMGVVRPLTEVEMDHYREPFLNPVDREPLWRFPNELPIAGEPANIVALVEEYADWLHQSPVPKLLFWGTPGVLIPPAEAARLAKSLPNCKAVDIGPGLNLLQEDNPDLIGSEIARWLSTLEISG

SEQ ID NO: 2405 - protein, 277 aa, Synthetic construct
MFHYVDVGPRDGTPVLFLHGNPTSSYVWRNIIPHVAPTHRCIAPDLIGMGKSDKPDLGYFFDDHVRFMDAFIEALGLEEVVLVIHDWGSALGFHWAKRNPERVKGIAFMEFIRPIPTWDEWPEFARETFQAFRTTDVGRKLIIDQNVFIEGTLPMGVVRPLTEVEMDHYREPFLNPVDREPLWRFPNELPIAGEPANIVALVEEYGDWLHQSPVPKLLFWGTPGVLIPPAEAARLAKSLPNCKAVDIGPGLNLLQEDNPDLIGSEIARWLSTLEISG

SEQ ID NO: 2406 - protein, 277 aa, Synthetic construct
MFHYVDVGPRDGTPVLFLHGNPTSSYVWRNIIPHVAPTHRCIAPDLIGMGKSDKPDLGYFFDDHVRFMDAFIEALGLEEVVLVIHDWGSALGFHWAKRNPERVKGIAFMEFIRPIPTWDEWPEFARETFQAFRTTDVGRKLIIDQNVFIEGTLPMGVVRPLTEVEMDHYREPFLNPVDREPLWRFPNELPIAGEPANIVALVEEYSDWLHQSPVPKLLFWGTPGVLIPPAEAARLAKSLPNCKAVDIGPGLNLLQEDNPDLIGSEIARWLSTLEISG

SEQ ID NO: 2407 - protein, 277 aa, Synthetic construct
MFHYVDVGPRDGTPVLFLHGNPTSSYVWRNIIPHVAPTHRCIAPDLIGMGKSDKPDLGYFFDDHVRFMDAFIEALGLEEVVLVIHDWGSALGFHWAKRNPERVKGIAFMEFIRPIPTWDEWPEFARETFQAFRTTDVGRKLIIDQNVFIEGTLPMGVVRPLTEVEMDHYREPFLNPVDREPLWRFPNELPIAGEPANIVALVEEYDDWLHQSPVPKLLFWGTPGVLIPPAEAARLAKSLPNCKAVDIGPGLNLLQEDNPDLIGSEIARWLSTLEISG

SEQ ID NO: 2408 - protein, 277 aa, Synthetic construct
MFHYVDVGPRDGTPVLFLHGNPTSSYVWRNIIPHVAPTHRCIAPDLIGMGKSDKPDLGYFFDDHVRFMDAFIEALGLEEVVLVIHDWGSALGFHWAKRNPERVKGIAFMEFIRPIPTWDEWPEFARETFQAFRTTDVGRKLIIDQNVFIEGTLPMGVVRPLTEVEMDHYREPFLNPVDREPLWRFPNELPIAGEPANIVALVEEYEDWLHQSPVPKLLFWGTPGVLIPPAEAARLAKSLPNCKAVDIGPGLNLLQEDNPDLIGSEIARWLSTLEISG

SEQ ID NO: 2409 - protein, 277 aa, Synthetic construct
MFHYVDVGPRDGTPVLFLHGNPTSSYVWRNIIPHVAPTHRCIAPDLIGMGKSDKPDLGYFFDDHVRFMDAFIEALGLEEVVLVIHDWGSALGFHWAKRNPERVKGIAFMEFIRPIPTWDEWPEFARETFQAFRTTDVGRKLIIDQNVFIEGTLPMGVVRPLTEVEMDHYREPFLNPVDREPLWRFPNELPIAGEPANIVALVEEYRDWLHQSPVPKLLFWGTPGVLIPPAEAARLAKSLPNCKAVDIGPGLNLLQEDNPDLIGSEIARWLSTLEISG

SEQ ID NO: 2410 - protein, 277 aa, Synthetic construct
MFHYVDVGPRDGTPVLFLHGNPTSSYVWRNIIPHVAPTHRCIAPDLIGMGKSDKPDLGYFFDDHVRFMDAFIEALGLEEVVLVIHDWGSALGFHWAKRNPERVKGIAFMEFIRPIPTWDEWPEFARETFQAFRTTDVGRKLIIDQNVFIEGTLPMGVVRPLTEVEMDHYREPFLNPVDREPLWRFPNELPIAGEPANIVALVEEYMAWLHQSPVPKLLFWGTPGVLIPPAEAARLAKSLPNCKAVDIGPGLNLLQEDNPDLIGSEIARWLSTLEISG

SEQ ID NO: 2411 - protein, 277 aa, Synthetic construct
MFHYVDVGPRDGTPVLFLHGNPTSSYVWRNIIPHVAPTHRCIAPDLIGMGKSDKPDLGYFFDDHVRFMDAFIEALGLEEVVLVIHDWGSALGFHWAKRNPERVKGIAFMEFIRPIPTWDEWPEFARETFQAFRTTDVGRKLIIDQNVFIEGTLPMGVVRPLTEVEMDHYREPFLNPVDREPLWRFPNELPIAGEPANIVALVEEYMEWLHQSPVPKLLFWGTPGVLIPPAEAARLAKSLPNCKAVDIGPGLNLLQEDNPDLIGSEIARWLSTLEISG

SEQ ID NO: 2412 - protein, 277 aa, Synthetic construct
MFHYVDVGPRDGTPVLFLHGNPTSSYVWRNIIPHVAPTHRCIAPDLIGMGKSDKPDLGYFFDDHVRFMDAFIEALGLEEVVLVIHDWGSALGFHWAKRNPERVKGIAFMEFIRPIPTWDEWPEFARETFQAFRTTDVGRKLIIDQNVFIEGTLPMGVVRPLTEVEMDHYREPFLNPVDREPLWRFPNELPIAGEPANIVALVEEYMSWLHQSPVPKLLFWGTPGVLIPPAEAARLAKSLPNCKAVDIGPGLNLLQEDNPDLIGSEIARWLSTLEISG

SEQ ID NO: 2413 - protein, 277 aa, Synthetic construct
MFHYVDVGPRDGTPVLFLHGNPTSSYVWRNIIPHVAPTHRCIAPDLIGMGKSDKPDLGYFFDDHVRFMDAFIEALGLEEVVLVIHDWGSALGFHWAKRNPERVKGIAFMEFIRPIPTWDEWPEFARETFQAFRTTDVGRKLIIDQNVFIEGTLPMGVVRPLTEVEMDHYREPFLNPVDREPLWRFPNELPIAGEPANIVALVEEYMTWLHQSPVPKLLFWGTPGVLIPPAEAARLAKSLPNCKAVDIGPGLNLLQEDNPDLIGSEIARWLSTLEISG

SEQ ID NO: 2414 - protein, 277 aa, Synthetic construct
MFHYVDVGPRDGTPVLFLHGNPTSSYVWRNIIPHVAPTHRCIAPDLIGMGKSDKPDLGYFFDDHVRFMDAFIEALGLEEVVLVIHDWGSALGFHWAKRNPERVKGIAFMEFIRPIPTWDEWPEFARETFQAFRTTDVGRKLIIDQNVFIEGTLPMGVVRPLTEVEMDHYREPFLNPVDREPLWRFPNELPIAGEPANIVALVEEYMGWLHQSPVPKLLFWGTPGVLIPPAEAARLAKSLPNCKAVDIGPGLNLLQEDNPDLIGSEIARWLSTLEISG

SEQ ID NO: 2415 - protein, 277 aa, Synthetic construct
MFHYVDVGPRDGTPVLFLHGNPTSSYVWRNIIPHVAPTHRCIAPDLIGMGKSDKPDLGYFFDDHVRFMDAFIEALGLEEVVLVIHDWGSALGFHWAKRNPERVKGIAFMEFIRPIPTWDEWPEFARETFQAFRTTDVGRKLIIDQNVFIEGTLPMGVVRPLTEVEMDHYREPFLNPVDREPLWRFPNELPIAGEPANIVALVEEYMQWLHQSPVPKLLFWGTPGVLIPPAEAARLAKSLPNCKAVDIGPGLNLLQEDNPDLIGSEIARWLSTLEISG

SEQ ID NO: 2416 - protein, 277 aa, Synthetic construct
MFHYVDVGPRDGTPVLFLHGNPTSSYVWRNIIPHVAPTHRCIAPDLIGMGKSDKPDLGYFFDDHVRFMDAFIEALGLEEVVLVIHDWGSALGFHWAKRNPERVKGIAFMEFIRPIPTWDEWPEFARETFQAFRTTDVGRKLIIDQNVFIEGTLPMGVVRPLTEVEMDHYREPFLNPVDREPLWRFPNELPIAGEPANIVALVEEYMDFLHQSPVPKLLFWGTPGVLIPPAEAARLAKSLPNCKAVDIGPGLNLLQEDNPDLIGSEIARWLSTLEISG

SEQ ID NO: 2417 - protein, 277 aa, Synthetic construct
MFHYVDVGPRDGTPVLFLHGNPTSSYVWRNIIPHVAPTHRCIAPDLIGMGKSDKPDLGYFFDDHVRFMDAFIEALGLEEVVLVIHDWGSALGFHWAKRNPERVKGIAFMEFIRPIPTWDEWPEFARETFQAFRTTDVGRKLIIDQNVFIEGTLPMGVVRPLTEVEMDHYREPFLNPVDREPLWRFPNELPIAGEPANIVALVEEYMDYLHQSPVPKLLFWGTPGVLIPPAEAARLAKSLPNCKAVDIGPGLNLLQEDNPDLIGSEIARWLSTLEISG

SEQ ID NO: 2418 - protein, 277 aa, Synthetic construct
MFHYVDVGPRDGTPVLFLHGNPTSSYVWRNIIPHVAPTHRCIAPDLIGMGKSDKPDLGYFFDDHVRFMDAFIEALGLEEVVLVIHDWGSALGFHWAKRNPERVKGIAFMEFIRPIPTWDEWPEFARETFQAFRTTDVGRKLIIDQNVFIEGTLPMGVVRPLTEVEMDHYREPFLNPVDREPLWRFPNELPIAGEPANIVALVEEYMDLLHQSPVPKLLFWGTPGVLIPPAEAARLAKSLPNCKAVDIGPGLNLLQEDNPDLIGSEIARWLSTLEISG

SEQ ID NO: 2419 - protein, 277 aa, Synthetic construct
MFHYVDVGPRDGTPVLFLHGNPTSSYVWRNIIPHVAPTHRCIAPDLIGMGKSDKPDLGYFFDDHVRFMDAFIEALGLEEVVLVIHDWGSALGFHWAKRNPERVKGIAFMEFIRPIPTWDEWPEFARETFQAFRTTDVGRKLIIDQNVFIEGTLPMGVVRPLTEVEMDHYREPFLNPVDREPLWRFPNELPIAGEPANIVALVEEYMDHLHQSPVPKLLFWGTPGVLIPPAEAARLAKSLPNCKAVDIGPGLNLLQEDNPDLIGSEIARWLSTLEISG

SEQ ID NO: 2420 - protein, 277 aa, Synthetic construct
MFHYVDVGPRDGTPVLFLHGNPTSSYVWRNIIPHVAPTHRCIAPDLIGMGKSDKPDLGYFFDDHVRFMDAFIEALGLEEVVLVIHDWGSALGFHWAKRNPERVKGIAFMEFIRPIPTWDEWPEFARETFQAFRTTDVGRKLIIDQNVFIEGTLPMGVVRPLTEVEMDHYREPFLNPVDREPLWRFPNELPIAGEPANIVALVEEYMDRLHQSPVPKLLFWGTPGVLIPPAEAARLAKSLPNCKAVDIGPGLNLLQEDNPDLIGSEIARWLSTLEISG

SEQ ID NO: 2421 - protein, 277 aa, Synthetic construct
MFHYVDVGPRDGTPVLFLHGNPTSSYVWRNIIPHVAPTHRCIAPDLIGMGKSDKPDLGYFFDDHVRFMDAFIEALGLEEVVLVIHDWGSALGFHWAKRNPERVKGIAFMEFIRPIPTWDEWPEFARETFQAFRTTDVGRKLIIDQNVFIEGTLPMGVVRPLTEVEMDHYREPFLNPVDREPLWRFPNELPIAGEPANIVALVEEYMDALHQSPVPKLLFWGTPGVLIPPAEAARLAKSLPNCKAVDIGPGLNLLQEDNPDLIGSEIARWLSTLEISG

SEQ ID NO: 2422 - protein, 277 aa, Synthetic construct
MFHYVDVGPRDGTPVLFLHGNPTSSYVWRNIIPHVAPTHRCIAPDLIGMGKSDKPDLGYFFDDHVRFMDAFIEALGLEEVVLVIHDWGSALGFHWAKRNPERVKGIAFMEFIRPIPTWDEWPEFARETFQAFRTTDVGRKLIIDQNVFIEGTLPMGVVRPLTEVEMDHYREPFLNPVDREPLWRFPNELPIAGEPANIVALVEEYMDWMHQSPVPKLLFWGTPGVLIPPAEAARLAKSLPNCKAVDIGPGLNLLQEDNPDLIGSEIARWLSTLEISG

SEQ ID NO: 2423 - protein, 277 aa, Synthetic construct
MFHYVDVGPRDGTPVLFLHGNPTSSYVWRNIIPHVAPTHRCIAPDLIGMGKSDKPDLGYFFDDHVRFMDAFIEALGLEEVVLVIHDWGSALGFHWAKRNPERVKGIAFMEFIRPIPTWDEWPEFARETFQAFRTTDVGRKLIIDQNVFIEGTLPMGVVRPLTEVEMDHYREPFLNPVDREPLWRFPNELPIAGEPANIVALVEEYMDWIHQSPVPKLLFWGTPGVLIPPAEAARLAKSLPNCKAVDIGPGLNLLQEDNPDLIGSEIARWLSTLEISG

SEQ ID NO: 2424 - protein, 277 aa, Synthetic construct
MFHYVDVGPRDGTPVLFLHGNPTSSYVWRNIIPHVAPTHRCIAPDLIGMGKSDKPDLGYFFDDHVRFMDAFIEALGLEEVVLVIHDWGSALGFHWAKRNPERVKGIAFMEFIRPIPTWDEWPEFARETFQAFRTTDVGRKLIIDQNVFIEGTLPMGVVRPLTEVEMDHYREPFLNPVDREPLWRFPNELPIAGEPANIVALVEEYMDWFHQSPVPKLLFWGTPGVLIPPAEAARLAKSLPNCKAVDIGPGLNLLQEDNPDLIGSEIARWLSTLEISG

SEQ ID NO: 2425 - protein, 277 aa, Synthetic construct
MFHYVDVGPRDGTPVLFLHGNPTSSYVWRNIIPHVAPTHRCIAPDLIGMGKSDKPDLGYFFDDHVRFMDAFIEALGLEEVVLVIHDWGSALGFHWAKRNPERVKGIAFMEFIRPIPTWDEWPEFARETFQAFRTTDVGRKLIIDQNVFIEGTLPMGVVRPLTEVEMDHYREPFLNPVDREPLWRFPNELPIAGEPANIVALVEEYMDWVHQSPVPKLLFWGTPGVLIPPAEAARLAKSLPNCKAVDIGPGLNLLQEDNPDLIGSEIARWLSTLEISG

SEQ ID NO: 2426 - protein, 277 aa, Synthetic construct
MFHYVDVGPRDGTPVLFLHGNPTSSYVWRNIIPHVAPTHRCIAPDLIGMGKSDKPDLGYFFDDHVRFMDAFIEALGLEEVVLVIHDWGSALGFHWAKRNPERVKGIAFMEFIRPIPTWDEWPEFARETFQAFRTTDVGRKLIIDQNVFIEGTLPMGVVRPLTEVEMDHYREPFLNPVDREPLWRFPNELPIAGEPANIVALVEEYMDWAHQSPVPKLLFWGTPGVLIPPAEAARLAKSLPNCKAVDIGPGLNLLQEDNPDLIGSEIARWLSTLEISG

SEQ ID NO: 2427 - protein, 277 aa, Synthetic construct
MFHYVDVGPRDGTPVLFLHGNPTSSYVWRNIIPHVAPTHRCIAPDLIGMGKSDKPDLGYFFDDHVRFMDAFIEALGLEEVVLVIHDWGSALGFHWAKRNPERVKGIAFMEFIRPIPTWDEWPEFARETFQAFRTTDVGRKLIIDQNVFIEGTLPMGVVRPLTEVEMDHYREPFLNPVDREPLWRFPNELPIAGEPANIVALVEEYMDWTHQSPVPKLLFWGTPGVLIPPAEAARLAKSLPNCKAVDIGPGLNLLQEDNPDLIGSEIARWLSTLEISG

SEQ ID NO: 2428 - protein, 277 aa, Synthetic construct
MFHYVDVGPRDGTPVLFLHGNPTSSYVWRNIIPHVAPTHRCIAPDLIGMGKSDKPDLGYFFDDHVRFMDAFIEALGLEEVVLVIHDWGSALGFHWAKRNPERVKGIAFMEFIRPIPTWDEWPEFARETFQAFRTTDVGRKLIIDQNVFIEGTLPMGVVRPLTEVEMDHYREPFLNPVDREPLWRFPNELPIAGEPANIVALVEEYMDWLAQSPVPKLLFWGTPGVLIPPAEAARLAKSLPNCKAVDIGPGLNLLQEDNPDLIGSEIARWLSTLEISG

SEQ ID NO: 2429 - protein, 277 aa, Synthetic construct
MFHYVDVGPRDGTPVLFLHGNPTSSYVWRNIIPHVAPTHRCIAPDLIGMGKSDKPDLGYFFDDHVRFMDAFIEALGLEEVVLVIHDWGSALGFHWAKRNPERVKGIAFMEFIRPIPTWDEWPEFARETFQAFRTTDVGRKLIIDQNVFIEGTLPMGVVRPLTEVEMDHYREPFLNPVDREPLWRFPNELPIAGEPANIVALVEEYMDWLSQSPVPKLLFWGTPGVLIPPAEAARLAKSLPNCKAVDIGPGLNLLQEDNPDLIGSEIARWLSTLEISG

SEQ ID NO: 2430 - protein, 277 aa, Synthetic construct
MFHYVDVGPRDGTPVLFLHGNPTSSYVWRNIIPHVAPTHRCIAPDLIGMGKSDKPDLGYFFDDHVRFMDAFIEALGLEEVVLVIHDWGSALGFHWAKRNPERVKGIAFMEFIRPIPTWDEWPEFARETFQAFRTTDVGRKLIIDQNVFIEGTLPMGVVRPLTEVEMDHYREPFLNPVDREPLWRFPNELPIAGEPANIVALVEEYMDWLRQSPVPKLLFWGTPGVLIPPAEAARLAKSLPNCKAVDIGPGLNLLQEDNPDLIGSEIARWLSTLEISG

SEQ ID NO: 2431 - protein, 277 aa, Synthetic construct
MFHYVDVGPRDGTPVLFLHGNPTSSYVWRNIIPHVAPTHRCIAPDLIGMGKSDKPDLGYFFDDHVRFMDAFIEALGLEEVVLVIHDWGSALGFHWAKRNPERVKGIAFMEFIRPIPTWDEWPEFARETFQAFRTTDVGRKLIIDQNVFIEGTLPMGVVRPLTEVEMDHYREPFLNPVDREPLWRFPNELPIAGEPANIVALVEEYMDWLGQSPVPKLLFWGTPGVLIPPAEAARLAKSLPNCKAVDIGPGLNLLQEDNPDLIGSEIARWLSTLEISG

SEQ ID NO: 2432 - protein, 277 aa, Synthetic construct
MFHYVDVGPRDGTPVLFLHGNPTSSYVWRNIIPHVAPTHRCIAPDLIGMGKSDKPDLGYFFDDHVRFMDAFIEALGLEEVVLVIHDWGSALGFHWAKRNPERVKGIAFMEFIRPIPTWDEWPEFARETFQAFRTTDVGRKLIIDQNVFIEGTLPMGVVRPLTEVEMDHYREPFLNPVDREPLWRFPNELPIAGEPANIVALVEEYMDWLEQSPVPKLLFWGTPGVLIPPAEAARLAKSLPNCKAVDIGPGLNLLQEDNPDLIGSEIARWLSTLEISG

SEQ ID NO: 2433 - protein, 277 aa, Synthetic construct
MFHYVDVGPRDGTPVLFLHGNPTSSYVWRNIIPHVAPTHRCIAPDLIGMGKSDKPDLGYFFDDHVRFMDAFIEALGLEEVVLVIHDWGSALGFHWAKRNPERVKGIAFMEFIRPIPTWDEWPEFARETFQAFRTTDVGRKLIIDQNVFIEGTLPMGVVRPLTEVEMDHYREPFLNPVDREPLWRFPNELPIAGEPANIVALVEEYMDWLKQSPVPKLLFWGTPGVLIPPAEAARLAKSLPNCKAVDIGPGLNLLQEDNPDLIGSEIARWLSTLEISG

SEQ ID NO: 2434 - protein, 277 aa, Synthetic construct
MFHYVDVGPRDGTPVLFLHGNPTSSYVWRNIIPHVAPTHRCIAPDLIGMGKSDKPDLGYFFDDHVRFMDAFIEALGLEEVVLVIHDWGSALGFHWAKRNPERVKGIAFMEFIRPIPTWDEWPEFARETFQAFRTTDVGRKLIIDQNVFIEGTLPMGVVRPLTEVEMDHYREPFLNPVDREPLWRFPNELPIAGEPANIVALVEEYMDWLHTSPVPKLLFWGTPGVLIPPAEAARLAKSLPNCKAVDIGPGLNLLQEDNPDLIGSEIARWLSTLEISG

SEQ ID NO: 2435 - protein, 277 aa, Synthetic construct
MFHYVDVGPRDGTPVLFLHGNPTSSYVWRNIIPHVAPTHRCIAPDLIGMGKSDKPDLGYFFDDHVRFMDAFIEALGLEEVVLVIHDWGSALGFHWAKRNPERVKGIAFMEFIRPIPTWDEWPEFARETFQAFRTTDVGRKLIIDQNVFIEGTLPMGVVRPLTEVEMDHYREPFLNPVDREPLWRFPNELPIAGEPANIVALVEEYMDWLHASPVPKLLFWGTPGVLIPPAEAARLAKSLPNCKAVDIGPGLNLLQEDNPDLIGSEIARWLSTLEISG

SEQ ID NO: 2436 - protein, 277 aa, Synthetic construct
MFHYVDVGPRDGTPVLFLHGNPTSSYVWRNIIPHVAPTHRCIAPDLIGMGKSDKPDLGYFFDDHVRFMDAFIEALGLEEVVLVIHDWGSALGFHWAKRNPERVKGIAFMEFIRPIPTWDEWPEFARETFQAFRTTDVGRKLIIDQNVFIEGTLPMGVVRPLTEVEMDHYREPFLNPVDREPLWRFPNELPIAGEPANIVALVEEYMDWLHSSPVPKLLFWGTPGVLIPPAEAARLAKSLPNCKAVDIGPGLNLLQEDNPDLIGSEIARWLSTLEISG

SEQ ID NO: 2437 - protein, 277 aa, Synthetic construct
MFHYVDVGPRDGTPVLFLHGNPTSSYVWRNIIPHVAPTHRCIAPDLIGMGKSDKPDLGYFFDDHVRFMDAFIEALGLEEVVLVIHDWGSALGFHWAKRNPERVKGIAFMEFIRPIPTWDEWPEFARETFQAFRTTDVGRKLIIDQNVFIEGTLPMGVVRPLTEVEMDHYREPFLNPVDREPLWRFPNELPIAGEPANIVALVEEYMDWLHRSPVPKLLFWGTPGVLIPPAEAARLAKSLPNCKAVDIGPGLNLLQEDNPDLIGSEIARWLSTLEISG

SEQ ID NO: 2438 - protein, 277 aa, Synthetic construct
MFHYVDVGPRDGTPVLFLHGNPTSSYVWRNIIPHVAPTHRCIAPDLIGMGKSDKPDLGYFFDDHVRFMDAFIEALGLEEVVLVIHDWGSALGFHWAKRNPERVKGIAFMEFIRPIPTWDEWPEFARETFQAFRTTDVGRKLIIDQNVFIEGTLPMGVVRPLTEVEMDHYREPFLNPVDREPLWRFPNELPIAGEPANIVALVEEYMDWLHESPVPKLLFWGTPGVLIPPAEAARLAKSLPNCKAVDIGPGLNLLQEDNPDLIGSEIARWLSTLEISG

SEQ ID NO: 2439 - protein, 277 aa, Synthetic construct
MFHYVDVGPRDGTPVLFLHGNPTSSYVWRNIIPHVAPTHRCIAPDLIGMGKSDKPDLGYFFDDHVRFMDAFIEALGLEEVVLVIHDWGSALGFHWAKRNPERVKGIAFMEFIRPIPTWDEWPEFARETFQAFRTTDVGRKLIIDQNVFIEGTLPMGVVRPLTEVEMDHYREPFLNPVDREPLWRFPNELPIAGEPANIVALVEEYMDWLHKSPVPKLLFWGTPGVLIPPAEAARLAKSLPNCKAVDIGPGLNLLQEDNPDLIGSEIARWLSTLEISG

SEQ ID NO: 2440 - protein, 277 aa, Synthetic construct
MFHYVDVGPRDGTPVLFLHGNPTSSYVWRNIIPHVAPTHRCIAPDLIGMGKSDKPDLGYFFDDHVRFMDAFIEALGLEEVVLVIHDWGSALGFHWAKRNPERVKGIAFMEFIRPIPTWDEWPEFARETFQAFRTTDVGRKLIIDQNVFIEGTLPMGVVRPLTEVEMDHYREPFLNPVDREPLWRFPNELPIAGEPANIVALVEEYMDWLHQTPVPKLLFWGTPGVLIPPAEAARLAKSLPNCKAVDIGPGLNLLQEDNPDLIGSEIARWLSTLEISG

SEQ ID NO: 2441 - protein, 277 aa, Synthetic construct
MFHYVDVGPRDGTPVLFLHGNPTSSYVWRNIIPHVAPTHRCIAPDLIGMGKSDKPDLGYFFDDHVRFMDAFIEALGLEEVVLVIHDWGSALGFHWAKRNPERVKGIAFMEFIRPIPTWDEWPEFARETFQAFRTTDVGRKLIIDQNVFIEGTLPMGVVRPLTEVEMDHYREPFLNPVDREPLWRFPNELPIAGEPANIVALVEEYMDWLHQNPVPKLLFWGTPGVLIPPAEAARLAKSLPNCKAVDIGPGLNLLQEDNPDLIGSEIARWLSTLEISG

SEQ ID NO: 2442 - protein, 277 aa, Synthetic construct
MFHYVDVGPRDGTPVLFLHGNPTSSYVWRNIIPHVAPTHRCIAPDLIGMGKSDKPDLGYFFDDHVRFMDAFIEALGLEEVVLVIHDWGSALGFHWAKRNPERVKGIAFMEFIRPIPTWDEWPEFARETFQAFRTTDVGRKLIIDQNVFIEGTLPMGVVRPLTEVEMDHYREPFLNPVDREPLWRFPNELPIAGEPANIVALVEEYMDWLHQAPVPKLLFWGTPGVLIPPAEAARLAKSLPNCKAVDIGPGLNLLQEDNPDLIGSEIARWLSTLEISG

SEQ ID NO: 2443 - protein, 277 aa, Synthetic construct
MFHYVDVGPRDGTPVLFLHGNPTSSYVWRNIIPHVAPTHRCIAPDLIGMGKSDKPDLGYFFDDHVRFMDAFIEALGLEEVVLVIHDWGSALGFHWAKRNPERVKGIAFMEFIRPIPTWDEWPEFARETFQAFRTTDVGRKLIIDQNVFIEGTLPMGVVRPLTEVEMDHYREPFLNPVDREPLWRFPNELPIAGEPANIVALVEEYMDWLHQCPVPKLLFWGTPGVLIPPAEAARLAKSLPNCKAVDIGPGLNLLQEDNPDLIGSEIARWLSTLEISG

SEQ ID NO: 2444 - protein, 277 aa, Synthetic construct
MFHYVDVGPRDGTPVLFLHGNPTSSYVWRNIIPHVAPTHRCIAPDLIGMGKSDKPDLGYFFDDHVRFMDAFIEALGLEEVVLVIHDWGSALGFHWAKRNPERVKGIAFMEFIRPIPTWDEWPEFARETFQAFRTTDVGRKLIIDQNVFIEGTLPMGVVRPLTEVEMDHYREPFLNPVDREPLWRFPNELPIAGEPANIVALVEEYMDWLHQHPVPKLLFWGTPGVLIPPAEAARLAKSLPNCKAVDIGPGLNLLQEDNPDLIGSEIARWLSTLEISG

SEQ ID NO: 2445 - protein, 277 aa, Synthetic construct
MFHYVDVGPRDGTPVLFLHGNPTSSYVWRNIIPHVAPTHRCIAPDLIGMGKSDKPDLGYFFDDHVRFMDAFIEALGLEEVVLVIHDWGSALGFHWAKRNPERVKGIAFMEFIRPIPTWDEWPEFARETFQAFRTTDVGRKLIIDQNVFIEGTLPMGVVRPLTEVEMDHYREPFLNPVDREPLWRFPNELPIAGEPANIVALVEEYMDWLHQQPVPKLLFWGTPGVLIPPAEAARLAKSLPNCKAVDIGPGLNLLQEDNPDLIGSEIARWLSTLEISG

SEQ ID NO: 2446 - protein, 277 aa, Synthetic construct
MFHYVDVGPRDGTPVLFLHGNPTSSYVWRNIIPHVAPTHRCIAPDLIGMGKSDKPDLGYFFDDHVRFMDAFIEALGLEEVVLVIHDWGSALGFHWAKRNPERVKGIAFMEFIRPIPTWDEWPEFARETFQAFRTTDVGRKLIIDQNVFIEGTLPMGVVRPLTEVEMDHYREPFLNPVDREPLWRFPNELPIAGEPANIVALVEEYMDWLHQSDVPKLLFWGTPGVLIPPAEAARLAKSLPNCKAVDIGPGLNLLQEDNPDLIGSEIARWLSTLEISG

SEQ ID NO: 2447 - protein, 277 aa, Synthetic construct
MFHYVDVGPRDGTPVLFLHGNPTSSYVWRNIIPHVAPTHRCIAPDLIGMGKSDKPDLGYFFDDHVRFMDAFIEALGLEEVVLVIHDWGSALGFHWAKRNPERVKGIAFMEFIRPIPTWDEWPEFARETFQAFRTTDVGRKLIIDQNVFIEGTLPMGVVRPLTEVEMDHYREPFLNPVDREPLWRFPNELPIAGEPANIVALVEEYMDWLHQSEVPKLLFWGTPGVLIPPAEAARLAKSLPNCKAVDIGPGLNLLQEDNPDLIGSEIARWLSTLEISG

SEQ ID NO: 2448 - protein, 277 aa, Synthetic construct
MFHYVDVGPRDGTPVLFLHGNPTSSYVWRNIIPHVAPTHRCIAPDLIGMGKSDKPDLGYFFDDHVRFMDAFIEALGLEEVVLVIHDWGSALGFHWAKRNPERVKGIAFMEFIRPIPTWDEWPEFARETFQAFRTTDVGRKLIIDQNVFIEGTLPMGVVRPLTEVEMDHYREPFLNPVDREPLWRFPNELPIAGEPANIVALVEEYMDWLHQSTVPKLLFWGTPGVLIPPAEAARLAKSLPNCKAVDIGPGLNLLQEDNPDLIGSEIARWLSTLEISG

SEQ ID NO: 2449 - protein, 277 aa, Synthetic construct
MFHYVDVGPRDGTPVLFLHGNPTSSYVWRNIIPHVAPTHRCIAPDLIGMGKSDKPDLGYFFDDHVRFMDAFIEALGLEEVVLVIHDWGSALGFHWAKRNPERVKGIAFMEFIRPIPTWDEWPEFARETFQAFRTTDVGRKLIIDQNVFIEGTLPMGVVRPLTEVEMDHYREPFLNPVDREPLWRFPNELPIAGEPANIVALVEEYMDWLHQSSVPKLLFWGTPGVLIPPAEAARLAKSLPNCKAVDIGPGLNLLQEDNPDLIGSEIARWLSTLEISG

SEQ ID NO: 2450 - protein, 277 aa, Synthetic construct
MFHYVDVGPRDGTPVLFLHGNPTSSYVWRNIIPHVAPTHRCIAPDLIGMGKSDKPDLGYFFDDHVRFMDAFIEALGLEEVVLVIHDWGSALGFHWAKRNPERVKGIAFMEFIRPIPTWDEWPEFARETFQAFRTTDVGRKLIIDQNVFIEGTLPMGVVRPLTEVEMDHYREPFLNPVDREPLWRFPNELPIAGEPANIVALVEEYMDWLHQSQVPKLLFWGTPGVLIPPAEAARLAKSLPNCKAVDIGPGLNLLQEDNPDLIGSEIARWLSTLEISG

SEQ ID NO: 2451 - protein, 277 aa, Synthetic construct
MFHYVDVGPRDGTPVLFLHGNPTSSYVWRNIIPHVAPTHRCIAPDLIGMGKSDKPDLGYFFDDHVRFMDAFIEALGLEEVVLVIHDWGSALGFHWAKRNPERVKGIAFMEFIRPIPTWDEWPEFARETFQAFRTTDVGRKLIIDQNVFIEGTLPMGVVRPLTEVEMDHYREPFLNPVDREPLWRFPNELPIAGEPANIVALVEEYMDWLHQSAVPKLLFWGTPGVLIPPAEAARLAKSLPNCKAVDIGPGLNLLQEDNPDLIGSEIARWLSTLEISG

SEQ ID NO: 2452 - protein, 277 aa, Synthetic construct
MFHYVDVGPRDGTPVLFLHGNPTSSYVWRNIIPHVAPTHRCIAPDLIGMGKSDKPDLGYFFDDHVRFMDAFIEALGLEEVVLVIHDWGSALGFHWAKRNPERVKGIAFMEFIRPIPTWDEWPEFARETFQAFRTTDVGRKLIIDQNVFIEGTLPMGVVRPLTEVEMDHYREPFLNPVDREPLWRFPNELPIAGEPANIVALVEEYMDWLHQSPLPKLLFWGTPGVLIPPAEAARLAKSLPNCKAVDIGPGLNLLQEDNPDLIGSEIARWLSTLEISG

SEQ ID NO: 2453 - protein, 277 aa, Synthetic construct
MFHYVDVGPRDGTPVLFLHGNPTSSYVWRNIIPHVAPTHRCIAPDLIGMGKSDKPDLGYFFDDHVRFMDAFIEALGLEEVVLVIHDWGSALGFHWAKRNPERVKGIAFMEFIRPIPTWDEWPEFARETFQAFRTTDVGRKLIIDQNVFIEGTLPMGVVRPLTEVEMDHYREPFLNPVDREPLWRFPNELPIAGEPANIVALVEEYMDWLHQSPIPKLLFWGTPGVLIPPAEAARLAKSLPNCKAVDIGPGLNLLQEDNPDLIGSEIARWLSTLEISG

SEQ ID NO: 2454 - protein, 277 aa, Synthetic construct
MFHYVDVGPRDGTPVLFLHGNPTSSYVWRNIIPHVAPTHRCIAPDLIGMGKSDKPDLGYFFDDHVRFMDAFIEALGLEEVVLVIHDWGSALGFHWAKRNPERVKGIAFMEFIRPIPTWDEWPEFARETFQAFRTTDVGRKLIIDQNVFIEGTLPMGVVRPLTEVEMDHYREPFLNPVDREPLWRFPNELPIAGEPANIVALVEEYMDWLHQSPFPKLLFWGTPGVLIPPAEAARLAKSLPNCKAVDIGPGLNLLQEDNPDLIGSEIARWLSTLEISG

SEQ ID NO: 2455 - protein, 277 aa, Synthetic construct
MFHYVDVGPRDGTPVLFLHGNPTSSYVWRNIIPHVAPTHRCIAPDLIGMGKSDKPDLGYFFDDHVRFMDAFIEALGLEEVVLVIHDWGSALGFHWAKRNPERVKGIAFMEFIRPIPTWDEWPEFARETFQAFRTTDVGRKLIIDQNVFIEGTLPMGVVRPLTEVEMDHYREPFLNPVDREPLWRFPNELPIAGEPANIVALVEEYMDWLHQSPHPKLLFWGTPGVLIPPAEAARLAKSLPNCKAVDIGPGLNLLQEDNPDLIGSEIARWLSTLEISG

SEQ ID NO: 2456 - protein, 277 aa, Synthetic construct
MFHYVDVGPRDGTPVLFLHGNPTSSYVWRNIIPHVAPTHRCIAPDLIGMGKSDKPDLGYFFDDHVRFMDAFIEALGLEEVVLVIHDWGSALGFHWAKRNPERVKGIAFMEFIRPIPTWDEWPEFARETFQAFRTTDVGRKLIIDQNVFIEGTLPMGVVRPLTEVEMDHYREPFLNPVDREPLWRFPNELPIAGEPANIVALVEEYMDWLHQSPAPKLLFWGTPGVLIPPAEAARLAKSLPNCKAVDIGPGLNLLQEDNPDLIGSEIARWLSTLEISG

SEQ ID NO: 2457 - protein, 277 aa, Synthetic construct
MFHYVDVGPRDGTPVLFLHGNPTSSYVWRNIIPHVAPTHRCIAPDLIGMGKSDKPDLGYFFDDHVRFMDAFIEALGLEEVVLVIHDWGSALGFHWAKRNPERVKGIAFMEFIRPIPTWDEWPEFARETFQAFRTTDVGRKLIIDQNVFIEGTLPMGVVRPLTEVEMDHYREPFLNPVDREPLWRFPNELPIAGEPANIVALVEEYMDWLHQSPTPKLLFWGTPGVLIPPAEAARLAKSLPNCKAVDIGPGLNLLQEDNPDLIGSEIARWLSTLEISG

SEQ ID NO: 2458 - protein, 277 aa, Synthetic construct
MFHYVDVGPRDGTPVLFLHGNPTSSYVWRNIIPHVAPTHRCIAPDLIGMGKSDKPDLGYFFDDHVRFMDAFIEALGLEEVVLVIHDWGSALGFHWAKRNPERVKGIAFMEFIRPIPTWDEWPEFARETFQAFRTTDVGRKLIIDQNVFIEGTLPMGVVRPLTEVEMDHYREPFLNPVDREPLWRFPNELPIAGEPANIVALVEEYMDWLHQSPVAKLLFWGTPGVLIPPAEAARLAKSLPNCKAVDIGPGLNLLQEDNPDLIGSEIARWLSTLEISG

SEQ ID NO: 2459 - protein, 277 aa, Synthetic construct
MFHYVDVGPRDGTPVLFLHGNPTSSYVWRNIIPHVAPTHRCIAPDLIGMGKSDKPDLGYFFDDHVRFMDAFIEALGLEEVVLVIHDWGSALGFHWAKRNPERVKGIAFMEFIRPIPTWDEWPEFARETFQAFRTTDVGRKLIIDQNVFIEGTLPMGVVRPLTEVEMDHYREPFLNPVDREPLWRFPNELPIAGEPANIVALVEEYMDWLHQSPVEKLLFWGTPGVLIPPAEAARLAKSLPNCKAVDIGPGLNLLQEDNPDLIGSEIARWLSTLEISG

SEQ ID NO: 2460 - protein, 277 aa, Synthetic construct
MFHYVDVGPRDGTPVLFLHGNPTSSYVWRNIIPHVAPTHRCIAPDLIGMGKSDKPDLGYFFDDHVRFMDAFIEALGLEEVVLVIHDWGSALGFHWAKRNPERVKGIAFMEFIRPIPTWDEWPEFARETFQAFRTTDVGRKLIIDQNVFIEGTLPMGVVRPLTEVEMDHYREPFLNPVDREPLWRFPNELPIAGEPANIVALVEEYMDWLHQSPVSKLLFWGTPGVLIPPAEAARLAKSLPNCKAVDIGPGLNLLQEDNPDLIGSEIARWLSTLEISG

SEQ ID NO: 2461 - protein, 277 aa, Synthetic construct
MFHYVDVGPRDGTPVLFLHGNPTSSYVWRNIIPHVAPTHRCIAPDLIGMGKSDKPDLGYFFDDHVRFMDAFIEALGLEEVVLVIHDWGSALGFHWAKRNPERVKGIAFMEFIRPIPTWDEWPEFARETFQAFRTTDVGRKLIIDQNVFIEGTLPMGVVRPLTEVEMDHYREPFLNPVDREPLWRFPNELPIAGEPANIVALVEEYMDWLHQSPVDKLLFWGTPGVLIPPAEAARLAKSLPNCKAVDIGPGLNLLQEDNPDLIGSEIARWLSTLEISG

SEQ ID NO: 2462 - protein, 277 aa, Synthetic construct
MFHYVDVGPRDGTPVLFLHGNPTSSYVWRNIIPHVAPTHRCIAPDLIGMGKSDKPDLGYFFDDHVRFMDAFIEALGLEEVVLVIHDWGSALGFHWAKRNPERVKGIAFMEFIRPIPTWDEWPEFARETFQAFRTTDVGRKLIIDQNVFIEGTLPMGVVRPLTEVEMDHYREPFLNPVDREPLWRFPNELPIAGEPANIVALVEEYMDWLHQSPVQKLLFWGTPGVLIPPAEAARLAKSLPNCKAVDIGPGLNLLQEDNPDLIGSEIARWLSTLEISG

SEQ ID NO: 2463 - protein, 277 aa, Synthetic construct
MFHYVDVGPRDGTPVLFLHGNPTSSYVWRNIIPHVAPTHRCIAPDLIGMGKSDKPDLGYFFDDHVRFMDAFIEALGLEEVVLVIHDWGSALGFHWAKRNPERVKGIAFMEFIRPIPTWDEWPEFARETFQAFRTTDVGRKLIIDQNVFIEGTLPMGVVRPLTEVEMDHYREPFLNPVDREPLWRFPNELPIAGEPANIVALVEEYMDWLHQSPVRKLLFWGTPGVLIPPAEAARLAKSLPNCKAVDIGPGLNLLQEDNPDLIGSEIARWLSTLEISG

SEQ ID NO: 2464 - protein, 277 aa, Synthetic construct
MFHYVDVGPRDGTPVLFLHGNPTSSYVWRNIIPHVAPTHRCIAPDLIGMGKSDKPDLGYFFDDHVRFMDAFIEALGLEEVVLVIHDWGSALGFHWAKRNPERVKGIAFMEFIRPIPTWDEWPEFARETFQAFRTTDVGRKLIIDQNVFIEGTLPMGVVRPLTEVEMDHYREPFLNPVDREPLWRFPNELPIAGEPANIVALVEEYMDWLHQSPVPRLLFWGTPGVLIPPAEAARLAKSLPNCKAVDIGPGLNLLQEDNPDLIGSEIARWLSTLEISG

SEQ ID NO: 2465 - protein, 277 aa, Synthetic construct
MFHYVDVGPRDGTPVLFLHGNPTSSYVWRNIIPHVAPTHRCIAPDLIGMGKSDKPDLGYFFDDHVRFMDAFIEALGLEEVVLVIHDWGSALGFHWAKRNPERVKGIAFMEFIRPIPTWDEWPEFARETFQAFRTTDVGRKLIIDQNVFIEGTLPMGVVRPLTEVEMDHYREPFLNPVDREPLWRFPNELPIAGEPANIVALVEEYMDWLHQSPVPTLLFWGTPGVLIPPAEAARLAKSLPNCKAVDIGPGLNLLQEDNPDLIGSEIARWLSTLEISG

SEQ ID NO: 2466 - protein, 277 aa, Synthetic construct
MFHYVDVGPRDGTPVLFLHGNPTSSYVWRNIIPHVAPTHRCIAPDLIGMGKSDKPDLGYFFDDHVRFMDAFIEALGLEEVVLVIHDWGSALGFHWAKRNPERVKGIAFMEFIRPIPTWDEWPEFARETFQAFRTTDVGRKLIIDQNVFIEGTLPMGVVRPLTEVEMDHYREPFLNPVDREPLWRFPNELPIAGEPANIVALVEEYMDWLHQSPVPALLFWGTPGVLIPPAEAARLAKSLPNCKAVDIGPGLNLLQEDNPDLIGSEIARWLSTLEISG

SEQ ID NO: 2467 - protein, 277 aa, Synthetic construct
MFHYVDVGPRDGTPVLFLHGNPTSSYVWRNIIPHVAPTHRCIAPDLIGMGKSDKPDLGYFFDDHVRFMDAFIEALGLEEVVLVIHDWGSALGFHWAKRNPERVKGIAFMEFIRPIPTWDEWPEFARETFQAFRTTDVGRKLIIDQNVFIEGTLPMGVVRPLTEVEMDHYREPFLNPVDREPLWRFPNELPIAGEPANIVALVEEYMDWLHQSPVPQLLFWGTPGVLIPPAEAARLAKSLPNCKAVDIGPGLNLLQEDNPDLIGSEIARWLSTLEISG

SEQ ID NO: 2468 - protein, 277 aa, Synthetic construct
MFHYVDVGPRDGTPVLFLHGNPTSSYVWRNIIPHVAPTHRCIAPDLIGMGKSDKPDLGYFFDDHVRFMDAFIEALGLEEVVLVIHDWGSALGFHWAKRNPERVKGIAFMEFIRPIPTWDEWPEFARETFQAFRTTDVGRKLIIDQNVFIEGTLPMGVVRPLTEVEMDHYREPFLNPVDREPLWRFPNELPIAGEPANIVALVEEYMDWLHQSPVPMLLFWGTPGVLIPPAEAARLAKSLPNCKAVDIGPGLNLLQEDNPDLIGSEIARWLSTLEISG

SEQ ID NO: 2469 - protein, 277 aa, Synthetic construct
MFHYVDVGPRDGTPVLFLHGNPTSSYVWRNIIPHVAPTHRCIAPDLIGMGKSDKPDLGYFFDDHVRFMDAFIEALGLEEVVLVIHDWGSALGFHWAKRNPERVKGIAFMEFIRPIPTWDEWPEFARETFQAFRTTDVGRKLIIDQNVFIEGTLPMGVVRPLTEVEMDHYREPFLNPVDREPLWRFPNELPIAGEPANIVALVEEYMDWLHQSPVPSLLFWGTPGVLIPPAEAARLAKSLPNCKAVDIGPGLNLLQEDNPDLIGSEIARWLSTLEISG

SEQ ID NO: 2470 - protein, 277 aa, Synthetic construct
MFHYVDVGPRDGTPVLFLHGNPTSSYVWRNIIPHVAPTHRCIAPDLIGMGKSDKPDLGYFFDDHVRFMDAFIEALGLEEVVLVIHDWGSALGFHWAKRNPERVKGIAFMEFIRPIPTWDEWPEFARETFQAFRTTDVGRKLIIDQNVFIEGTLPMGVVRPLTEVEMDHYREPFLNPVDREPLWRFPNELPIAGEPANIVALVEEYMDWLHQSPVPKMLFWGTPGVLIPPAEAARLAKSLPNCKAVDIGPGLNLLQEDNPDLIGSEIARWLSTLEISG

SEQ ID NO: 2471 - protein, 277 aa, Synthetic construct
MFHYVDVGPRDGTPVLFLHGNPTSSYVWRNIIPHVAPTHRCIAPDLIGMGKSDKPDLGYFFDDHVRFMDAFIEALGLEEVVLVIHDWGSALGFHWAKRNPERVKGIAFMEFIRPIPTWDEWPEFARETFQAFRTTDVGRKLIIDQNVFIEGTLPMGVVRPLTEVEMDHYREPFLNPVDREPLWRFPNELPIAGEPANIVALVEEYMDWLHQSPVPKILFWGTPGVLIPPAEAARLAKSLPNCKAVDIGPGLNLLQEDNPDLIGSEIARWLSTLEISG

SEQ ID NO: 2472 - protein, 277 aa, Synthetic construct
MFHYVDVGPRDGTPVLFLHGNPTSSYVWRNIIPHVAPTHRCIAPDLIGMGKSDKPDLGYFFDDHVRFMDAFIEALGLEEVVLVIHDWGSALGFHWAKRNPERVKGIAFMEFIRPIPTWDEWPEFARETFQAFRTTDVGRKLIIDQNVFIEGTLPMGVVRPLTEVEMDHYREPFLNPVDREPLWRFPNELPIAGEPANIVALVEEYMDWLHQSPVPKFLFWGTPGVLIPPAEAARLAKSLPNCKAVDIGPGLNLLQEDNPDLIGSEIARWLSTLEISG

SEQ ID NO: 2473 - protein, 277 aa, Synthetic construct
MFHYVDVGPRDGTPVLFLHGNPTSSYVWRNIIPHVAPTHRCIAPDLIGMGKSDKPDLGYFFDDHVRFMDAFIEALGLEEVVLVIHDWGSALGFHWAKRNPERVKGIAFMEFIRPIPTWDEWPEFARETFQAFRTTDVGRKLIIDQNVFIEGTLPMGVVRPLTEVEMDHYREPFLNPVDREPLWRFPNELPIAGEPANIVALVEEYMDWLHQSPVPKVLFWGTPGVLIPPAEAARLAKSLPNCKAVDIGPGLNLLQEDNPDLIGSEIARWLSTLEISG

SEQ ID NO: 2474 - protein, 277 aa, Synthetic construct
MFHYVDVGPRDGTPVLFLHGNPTSSYVWRNIIPHVAPTHRCIAPDLIGMGKSDKPDLGYFFDDHVRFMDAFIEALGLEEVVLVIHDWGSALGFHWAKRNPERVKGIAFMEFIRPIPTWDEWPEFARETFQAFRTTDVGRKLIIDQNVFIEGTLPMGVVRPLTEVEMDHYREPFLNPVDREPLWRFPNELPIAGEPANIVALVEEYMDWLHQSPVPKALFWGTPGVLIPPAEAARLAKSLPNCKAVDIGPGLNLLQEDNPDLIGSEIARWLSTLEISG

SEQ ID NO: 2475 - protein, 277 aa, Synthetic construct
MFHYVDVGPRDGTPVLFLHGNPTSSYVWRNIIPHVAPTHRCIAPDLIGMGKSDKPDLGYFFDDHVRFMDAFIEALGLEEVVLVIHDWGSALGFHWAKRNPERVKGIAFMEFIRPIPTWDEWPEFARETFQAFRTTDVGRKLIIDQNVFIEGTLPMGVVRPLTEVEMDHYREPFLNPVDREPLWRFPNELPIAGEPANIVALVEEYMDWLHQSPVPKQLFWGTPGVLIPPAEAARLAKSLPNCKAVDIGPGLNLLQEDNPDLIGSEIARWLSTLEISG

SEQ ID NO: 2476 - protein, 277 aa, Synthetic construct
MFHYVDVGPRDGTPVLFLHGNPTSSYVWRNIIPHVAPTHRCIAPDLIGMGKSDKPDLGYFFDDHVRFMDAFIEALGLEEVVLVIHDWGSALGFHWAKRNPERVKGIAFMEFIRPIPTWDEWPEFARETFQAFRTTDVGRKLIIDQNVFIEGTLPMGVVRPLTEVEMDHYREPFLNPVDREPLWRFPNELPIAGEPANIVALVEEYMDWLHQSPVPKLIFWGTPGVLIPPAEAARLAKSLPNCKAVDIGPGLNLLQEDNPDLIGSEIARWLSTLEISG

SEQ ID NO: 2477 - protein, 277 aa, Synthetic construct
MFHYVDVGPRDGTPVLFLHGNPTSSYVWRNIIPHVAPTHRCIAPDLIGMGKSDKPDLGYFFDDHVRFMDAFIEALGLEEVVLVIHDWGSALGFHWAKRNPERVKGIAFMEFIRPIPTWDEWPEFARETFQAFRTTDVGRKLIIDQNVFIEGTLPMGVVRPLTEVEMDHYREPFLNPVDREPLWRFPNELPIAGEPANIVALVEEYMDWLHQSPVPKLFFWGTPGVLIPPAEAARLAKSLPNCKAVDIGPGLNLLQEDNPDLIGSEIARWLSTLEISG

SEQ ID NO: 2478 - protein, 277 aa, Synthetic construct
MFHYVDVGPRDGTPVLFLHGNPTSSYVWRNIIPHVAPTHRCIAPDLIGMGKSDKPDLGYFFDDHVRFMDAFIEALGLEEVVLVIHDWGSALGFHWAKRNPERVKGIAFMEFIRPIPTWDEWPEFARETFQAFRTTDVGRKLIIDQNVFIEGTLPMGVVRPLTEVEMDHYREPFLNPVDREPLWRFPNELPIAGEPANIVALVEEYMDWLHQSPVPKLVFWGTPGVLIPPAEAARLAKSLPNCKAVDIGPGLNLLQEDNPDLIGSEIARWLSTLEISG

SEQ ID NO: 2479 - protein, 277 aa, Synthetic construct
MFHYVDVGPRDGTPVLFLHGNPTSSYVWRNIIPHVAPTHRCIAPDLIGMGKSDKPDLGYFFDDHVRFMDAFIEALGLEEVVLVIHDWGSALGFHWAKRNPERVKGIAFMEFIRPIPTWDEWPEFARETFQAFRTTDVGRKLIIDQNVFIEGTLPMGVVRPLTEVEMDHYREPFLNPVDREPLWRFPNELPIAGEPANIVALVEEYMDWLHQSPVPKLMFWGTPGVLIPPAEAARLAKSLPNCKAVDIGPGLNLLQEDNPDLIGSEIARWLSTLEISG

SEQ ID NO: 2480 - protein, 277 aa, Synthetic construct
MFHYVDVGPRDGTPVLFLHGNPTSSYVWRNIIPHVAPTHRCIAPDLIGMGKSDKPDLGYFFDDHVRFMDAFIEALGLEEVVLVIHDWGSALGFHWAKRNPERVKGIAFMEFIRPIPTWDEWPEFARETFQAFRTTDVGRKLIIDQNVFIEGTLPMGVVRPLTEVEMDHYREPFLNPVDREPLWRFPNELPIAGEPANIVALVEEYMDWLHQSPVPKLAFWGTPGVLIPPAEAARLAKSLPNCKAVDIGPGLNLLQEDNPDLIGSEIARWLSTLEISG

SEQ ID NO: 2481 - protein, 277 aa, Synthetic construct
MFHYVDVGPRDGTPVLFLHGNPTSSYVWRNIIPHVAPTHRCIAPDLIGMGKSDKPDLGYFFDDHVRFMDAFIEALGLEEVVLVIHDWGSALGFHWAKRNPERVKGIAFMEFIRPIPTWDEWPEFARETFQAFRTTDVGRKLIIDQNVFIEGTLPMGVVRPLTEVEMDHYREPFLNPVDREPLWRFPNELPIAGEPANIVALVEEYMDWLHQSPVPKLYFWGTPGVLIPPAEAARLAKSLPNCKAVDIGPGLNLLQEDNPDLIGSEIARWLSTLEISG

SEQ ID NO: 2482 - protein, 277 aa, Synthetic construct
MFHYVDVGPRDGTPVLFLHGNPTSSYVWRNIIPHVAPTHRCIAPDLIGMGKSDKPDLGYFFDDHVRFMDAFIEALGLEEVVLVIHDWGSALGFHWAKRNPERVKGIAFMEFIRPIPTWDEWPEFARETFQAFRTTDVGRKLIIDQNVFIEGTLPMGVVRPLTEVEMDHYREPFLNPVDREPLWRFPNELPIAGEPANIVALVEEYMDWLHQSPVPKLLLWGTPGVLIPPAEAARLAKSLPNCKAVDIGPGLNLLQEDNPDLIGSEIARWLSTLEISG

SEQ ID NO: 2483 - protein, 277 aa, Synthetic construct
MFHYVDVGPRDGTPVLFLHGNPTSSYVWRNIIPHVAPTHRCIAPDLIGMGKSDKPDLGYFFDDHVRFMDAFIEALGLEEVVLVIHDWGSALGFHWAKRNPERVKGIAFMEFIRPIPTWDEWPEFARETFQAFRTTDVGRKLIIDQNVFIEGTLPMGVVRPLTEVEMDHYREPFLNPVDREPLWRFPNELPIAGEPANIVALVEEYMDWLHQSPVPKLLVWGTPGVLIPPAEAARLAKSLPNCKAVDIGPGLNLLQEDNPDLIGSEIARWLSTLEISG

SEQ ID NO: 2484 - protein, 277 aa, Synthetic construct
MFHYVDVGPRDGTPVLFLHGNPTSSYVWRNIIPHVAPTHRCIAPDLIGMGKSDKPDLGYFFDDHVRFMDAFIEALGLEEVVLVIHDWGSALGFHWAKRNPERVKGIAFMEFIRPIPTWDEWPEFARETFQAFRTTDVGRKLIIDQNVFIEGTLPMGVVRPLTEVEMDHYREPFLNPVDREPLWRFPNELPIAGEPANIVALVEEYMDWLHQSPVPKLLIWGTPGVLIPPAEAARLAKSLPNCKAVDIGPGLNLLQEDNPDLIGSEIARWLSTLEISG

SEQ ID NO: 2485 - protein, 277 aa, Synthetic construct
MFHYVDVGPRDGTPVLFLHGNPTSSYVWRNIIPHVAPTHRCIAPDLIGMGKSDKPDLGYFFDDHVRFMDAFIEALGLEEVVLVIHDWGSALGFHWAKRNPERVKGIAFMEFIRPIPTWDEWPEFARETFQAFRTTDVGRKLIIDQNVFIEGTLPMGVVRPLTEVEMDHYREPFLNPVDREPLWRFPNELPIAGEPANIVALVEEYMDWLHQSPVPKLLMWGTPGVLIPPAEAARLAKSLPNCKAVDIGPGLNLLQEDNPDLIGSEIARWLSTLEISG

SEQ ID NO: 2486 - protein, 277 aa, Synthetic construct
MFHYVDVGPRDGTPVLFLHGNPTSSYVWRNIIPHVAPTHRCIAPDLIGMGKSDKPDLGYFFDDHVRFMDAFIEALGLEEVVLVIHDWGSALGFHWAKRNPERVKGIAFMEFIRPIPTWDEWPEFARETFQAFRTTDVGRKLIIDQNVFIEGTLPMGVVRPLTEVEMDHYREPFLNPVDREPLWRFPNELPIAGEPANIVALVEEYMDWLHQSPVPKLLAWGTPGVLIPPAEAARLAKSLPNCKAVDIGPGLNLLQEDNPDLIGSEIARWLSTLEISG

SEQ ID NO: 2487 - protein, 277 aa, Synthetic construct
MFHYVDVGPRDGTPVLFLHGNPTSSYVWRNIIPHVAPTHRCIAPDLIGMGKSDKPDLGYFFDDHVRFMDAFIEALGLEEVVLVIHDWGSALGFHWAKRNPERVKGIAFMEFIRPIPTWDEWPEFARETFQAFRTTDVGRKLIIDQNVFIEGTLPMGVVRPLTEVEMDHYREPFLNPVDREPLWRFPNELPIAGEPANIVALVEEYMDWLHQSPVPKLLCWGTPGVLIPPAEAARLAKSLPNCKAVDIGPGLNLLQEDNPDLIGSEIARWLSTLEISG

SEQ ID NO: 2488 - protein, 277 aa, Synthetic construct
MFHYVDVGPRDGTPVLFLHGNPTSSYVWRNIIPHVAPTHRCIAPDLIGMGKSDKPDLGYFFDDHVRFMDAFIEALGLEEVVLVIHDWGSALGFHWAKRNPERVKGIAFMEFIRPIPTWDEWPEFARETFQAFRTTDVGRKLIIDQNVFIEGTLPMGVVRPLTEVEMDHYREPFLNPVDREPLWRFPNELPIAGEPANIVALVEEYMDWLHQSPVPKLLFRGTPGVLIPPAEAARLAKSLPNCKAVDIGPGLNLLQEDNPDLIGSEIARWLSTLEISG

SEQ ID NO: 2489 - protein, 277 aa, Synthetic construct
MFHYVDVGPRDGTPVLFLHGNPTSSYVWRNIIPHVAPTHRCIAPDLIGMGKSDKPDLGYFFDDHVRFMDAFIEALGLEEVVLVIHDWGSALGFHWAKRNPERVKGIAFMEFIRPIPTWDEWPEFARETFQAFRTTDVGRKLIIDQNVFIEGTLPMGVVRPLTEVEMDHYREPFLNPVDREPLWRFPNELPIAGEPANIVALVEEYMDWLHQSPVPKLLFYGTPGVLIPPAEAARLAKSLPNCKAVDIGPGLNLLQEDNPDLIGSEIARWLSTLEISG

SEQ ID NO: 2490 - protein, 277 aa, Synthetic construct
MFHYVDVGPRDGTPVLFLHGNPTSSYVWRNIIPHVAPTHRCIAPDLIGMGKSDKPDLGYFFDDHVRFMDAFIEALGLEEVVLVIHDWGSALGFHWAKRNPERVKGIAFMEFIRPIPTWDEWPEFARETFQAFRTTDVGRKLIIDQNVFIEGTLPMGVVRPLTEVEMDHYREPFLNPVDREPLWRFPNELPIAGEPANIVALVEEYMDWLHQSPVPKLLFTGTPGVLIPPAEAARLAKSLPNCKAVDIGPGLNLLQEDNPDLIGSEIARWLSTLEISG

SEQ ID NO: 2491 - protein, 277 aa, Synthetic construct
MFHYVDVGPRDGTPVLFLHGNPTSSYVWRNIIPHVAPTHRCIAPDLIGMGKSDKPDLGYFFDDHVRFMDAFIEALGLEEVVLVIHDWGSALGFHWAKRNPERVKGIAFMEFIRPIPTWDEWPEFARETFQAFRTTDVGRKLIIDQNVFIEGTLPMGVVRPLTEVEMDHYREPFLNPVDREPLWRFPNELPIAGEPANIVALVEEYMDWLHQSPVPKLLFHGTPGVLIPPAEAARLAKSLPNCKAVDIGPGLNLLQEDNPDLIGSEIARWLSTLEISG

SEQ ID NO: 2492 - protein, 277 aa, Synthetic construct
MFHYVDVGPRDGTPVLFLHGNPTSSYVWRNIIPHVAPTHRCIAPDLIGMGKSDKPDLGYFFDDHVRFMDAFIEALGLEEVVLVIHDWGSALGFHWAKRNPERVKGIAFMEFIRPIPTWDEWPEFARETFQAFRTTDVGRKLIIDQNVFIEGTLPMGVVRPLTEVEMDHYREPFLNPVDREPLWRFPNELPIAGEPANIVALVEEYMDWLHQSPVPKLLFFGTPGVLIPPAEAARLAKSLPNCKAVDIGPGLNLLQEDNPDLIGSEIARWLSTLEISG

SEQ ID NO: 2493 - protein, 277 aa, Synthetic construct
MFHYVDVGPRDGTPVLFLHGNPTSSYVWRNIIPHVAPTHRCIAPDLIGMGKSDKPDLGYFFDDHVRFMDAFIEALGLEEVVLVIHDWGSALGFHWAKRNPERVKGIAFMEFIRPIPTWDEWPEFARETFQAFRTTDVGRKLIIDQNVFIEGTLPMGVVRPLTEVEMDHYREPFLNPVDREPLWRFPNELPIAGEPANIVALVEEYMDWLHQSPVPKLLFVGTPGVLIPPAEAARLAKSLPNCKAVDIGPGLNLLQEDNPDLIGSEIARWLSTLEISG

SEQ ID NO: 2494 - protein, 277 aa, Synthetic construct
MFHYVDVGPRDGTPVLFLHGNPTSSYVWRNIIPHVAPTHRCIAPDLIGMGKSDKPDLGYFFDDHVRFMDAFIEALGLEEVVLVIHDWGSALGFHWAKRNPERVKGIAFMEFIRPIPTWDEWPEFARETFQAFRTTDVGRKLIIDQNVFIEGTLPMGVVRPLTEVEMDHYREPFLNPVDREPLWRFPNELPIAGEPANIVALVEEYMDWLHQSPVPKLLFWATPGVLIPPAEAARLAKSLPNCKAVDIGPGLNLLQEDNPDLIGSEIARWLSTLEISG

SEQ ID NO: 2495 - protein, 277 aa, Synthetic construct
MFHYVDVGPRDGTPVLFLHGNPTSSYVWRNIIPHVAPTHRCIAPDLIGMGKSDKPDLGYFFDDHVRFMDAFIEALGLEEVVLVIHDWGSALGFHWAKRNPERVKGIAFMEFIRPIPTWDEWPEFARETFQAFRTTDVGRKLIIDQNVFIEGTLPMGVVRPLTEVEMDHYREPFLNPVDREPLWRFPNELPIAGEPANIVALVEEYMDWLHQSPVPKLLFWSTPGVLIPPAEAARLAKSLPNCKAVDIGPGLNLLQEDNPDLIGSEIARWLSTLEISG

SEQ ID NO: 2496 - protein, 277 aa, Synthetic construct
MFHYVDVGPRDGTPVLFLHGNPTSSYVWRNIIPHVAPTHRCIAPDLIGMGKSDKPDLGYFFDDHVRFMDAFIEALGLEEVVLVIHDWGSALGFHWAKRNPERVKGIAFMEFIRPIPTWDEWPEFARETFQAFRTTDVGRKLIIDQNVFIEGTLPMGVVRPLTEVEMDHYREPFLNPVDREPLWRFPNELPIAGEPANIVALVEEYMDWLHQSPVPKLLFWTTPGVLIPPAEAARLAKSLPNCKAVDIGPGLNLLQEDNPDLIGSEIARWLSTLEISG

SEQ ID NO: 2497 - protein, 277 aa, Synthetic construct
MFHYVDVGPRDGTPVLFLHGNPTSSYVWRNIIPHVAPTHRCIAPDLIGMGKSDKPDLGYFFDDHVRFMDAFIEALGLEEVVLVIHDWGSALGFHWAKRNPERVKGIAFMEFIRPIPTWDEWPEFARETFQAFRTTDVGRKLIIDQNVFIEGTLPMGVVRPLTEVEMDHYREPFLNPVDREPLWRFPNELPIAGEPANIVALVEEYMDWLHQSPVPKLLFWPTPGVLIPPAEAARLAKSLPNCKAVDIGPGLNLLQEDNPDLIGSEIARWLSTLEISG

SEQ ID NO: 2498 - protein, 277 aa, Synthetic construct
MFHYVDVGPRDGTPVLFLHGNPTSSYVWRNIIPHVAPTHRCIAPDLIGMGKSDKPDLGYFFDDHVRFMDAFIEALGLEEVVLVIHDWGSALGFHWAKRNPERVKGIAFMEFIRPIPTWDEWPEFARETFQAFRTTDVGRKLIIDQNVFIEGTLPMGVVRPLTEVEMDHYREPFLNPVDREPLWRFPNELPIAGEPANIVALVEEYMDWLHQSPVPKLLFWCTPGVLIPPAEAARLAKSLPNCKAVDIGPGLNLLQEDNPDLIGSEIARWLSTLEISG

SEQ ID NO: 2499 - protein, 277 aa, Synthetic construct
MFHYVDVGPRDGTPVLFLHGNPTSSYVWRNIIPHVAPTHRCIAPDLIGMGKSDKPDLGYFFDDHVRFMDAFIEALGLEEVVLVIHDWGSALGFHWAKRNPERVKGIAFMEFIRPIPTWDEWPEFARETFQAFRTTDVGRKLIIDQNVFIEGTLPMGVVRPLTEVEMDHYREPFLNPVDREPLWRFPNELPIAGEPANIVALVEEYMDWLHQSPVPKLLFWVTPGVLIPPAEAARLAKSLPNCKAVDIGPGLNLLQEDNPDLIGSEIARWLSTLEISG

SEQ ID NO: 2500 - protein, 277 aa, Synthetic construct
MFHYVDVGPRDGTPVLFLHGNPTSSYVWRNIIPHVAPTHRCIAPDLIGMGKSDKPDLGYFFDDHVRFMDAFIEALGLEEVVLVIHDWGSALGFHWAKRNPERVKGIAFMEFIRPIPTWDEWPEFARETFQAFRTTDVGRKLIIDQNVFIEGTLPMGVVRPLTEVEMDHYREPFLNPVDREPLWRFPNELPIAGEPANIVALVEEYMDWLHQSPVPKLLFWGKPGVLIPPAEAARLAKSLPNCKAVDIGPGLNLLQEDNPDLIGSEIARWLSTLEISG

SEQ ID NO: 2501 - protein, 277 aa, Synthetic construct
MFHYVDVGPRDGTPVLFLHGNPTSSYVWRNIIPHVAPTHRCIAPDLIGMGKSDKPDLGYFFDDHVRFMDAFIEALGLEEVVLVIHDWGSALGFHWAKRNPERVKGIAFMEFIRPIPTWDEWPEFARETFQAFRTTDVGRKLIIDQNVFIEGTLPMGVVRPLTEVEMDHYREPFLNPVDREPLWRFPNELPIAGEPANIVALVEEYMDWLHQSPVPKLLFWGEPGVLIPPAEAARLAKSLPNCKAVDIGPGLNLLQEDNPDLIGSEIARWLSTLEISG

SEQ ID NO: 2502 - protein, 277 aa, Synthetic construct
MFHYVDVGPRDGTPVLFLHGNPTSSYVWRNIIPHVAPTHRCIAPDLIGMGKSDKPDLGYFFDDHVRFMDAFIEALGLEEVVLVIHDWGSALGFHWAKRNPERVKGIAFMEFIRPIPTWDEWPEFARETFQAFRTTDVGRKLIIDQNVFIEGTLPMGVVRPLTEVEMDHYREPFLNPVDREPLWRFPNELPIAGEPANIVALVEEYMDWLHQSPVPKLLFWGNPGVLIPPAEAARLAKSLPNCKAVDIGPGLNLLQEDNPDLIGSEIARWLSTLEISG

SEQ ID NO: 2503 - protein, 277 aa, Synthetic construct
MFHYVDVGPRDGTPVLFLHGNPTSSYVWRNIIPHVAPTHRCIAPDLIGMGKSDKPDLGYFFDDHVRFMDAFIEALGLEEVVLVIHDWGSALGFHWAKRNPERVKGIAFMEFIRPIPTWDEWPEFARETFQAFRTTDVGRKLIIDQNVFIEGTLPMGVVRPLTEVEMDHYREPFLNPVDREPLWRFPNELPIAGEPANIVALVEEYMDWLHQSPVPKLLFWGAPGVLIPPAEAARLAKSLPNCKAVDIGPGLNLLQEDNPDLIGSEIARWLSTLEISG

SEQ ID NO: 2504 - protein, 277 aa, Synthetic construct
MFHYVDVGPRDGTPVLFLHGNPTSSYVWRNIIPHVAPTHRCIAPDLIGMGKSDKPDLGYFFDDHVRFMDAFIEALGLEEVVLVIHDWGSALGFHWAKRNPERVKGIAFMEFIRPIPTWDEWPEFARETFQAFRTTDVGRKLIIDQNVFIEGTLPMGVVRPLTEVEMDHYREPFLNPVDREPLWRFPNELPIAGEPANIVALVEEYMDWLHQSPVPKLLFWGRPGVLIPPAEAARLAKSLPNCKAVDIGPGLNLLQEDNPDLIGSEIARWLSTLEISG

SEQ ID NO: 2505 - protein, 277 aa, Synthetic construct
MFHYVDVGPRDGTPVLFLHGNPTSSYVWRNIIPHVAPTHRCIAPDLIGMGKSDKPDLGYFFDDHVRFMDAFIEALGLEEVVLVIHDWGSALGFHWAKRNPERVKGIAFMEFIRPIPTWDEWPEFARETFQAFRTTDVGRKLIIDQNVFIEGTLPMGVVRPLTEVEMDHYREPFLNPVDREPLWRFPNELPIAGEPANIVALVEEYMDWLHQSPVPKLLFWGDPGVLIPPAEAARLAKSLPNCKAVDIGPGLNLLQEDNPDLIGSEIARWLSTLEISG

SEQ ID NO: 2506 - protein, 277 aa, Synthetic construct
MFHYVDVGPRDGTPVLFLHGNPTSSYVWRNIIPHVAPTHRCIAPDLIGMGKSDKPDLGYFFDDHVRFMDAFIEALGLEEVVLVIHDWGSALGFHWAKRNPERVKGIAFMEFIRPIPTWDEWPEFARETFQAFRTTDVGRKLIIDQNVFIEGTLPMGVVRPLTEVEMDHYREPFLNPVDREPLWRFPNELPIAGEPANIVALVEEYMDWLHQSPVPKLLFWGTEGVLIPPAEAARLAKSLPNCKAVDIGPGLNLLQEDNPDLIGSEIARWLSTLEISG

SEQ ID NO: 2507 - protein, 277 aa, Synthetic construct
MFHYVDVGPRDGTPVLFLHGNPTSSYVWRNIIPHVAPTHRCIAPDLIGMGKSDKPDLGYFFDDHVRFMDAFIEALGLEEVVLVIHDWGSALGFHWAKRNPERVKGIAFMEFIRPIPTWDEWPEFARETFQAFRTTDVGRKLIIDQNVFIEGTLPMGVVRPLTEVEMDHYREPFLNPVDREPLWRFPNELPIAGEPANIVALVEEYMDWLHQSPVPKLLFWGTKGVLIPPAEAARLAKSLPNCKAVDIGPGLNLLQEDNPDLIGSEIARWLSTLEISG

SEQ ID NO: 2508 - protein, 277 aa, Synthetic construct
MFHYVDVGPRDGTPVLFLHGNPTSSYVWRNIIPHVAPTHRCIAPDLIGMGKSDKPDLGYFFDDHVRFMDAFIEALGLEEVVLVIHDWGSALGFHWAKRNPERVKGIAFMEFIRPIPTWDEWPEFARETFQAFRTTDVGRKLIIDQNVFIEGTLPMGVVRPLTEVEMDHYREPFLNPVDREPLWRFPNELPIAGEPANIVALVEEYMDWLHQSPVPKLLFWGTAGVLIPPAEAARLAKSLPNCKAVDIGPGLNLLQEDNPDLIGSEIARWLSTLEISG

SEQ ID NO: 2509 - protein, 277 aa, Synthetic construct
MFHYVDVGPRDGTPVLFLHGNPTSSYVWRNIIPHVAPTHRCIAPDLIGMGKSDKPDLGYFFDDHVRFMDAFIEALGLEEVVLVIHDWGSALGFHWAKRNPERVKGIAFMEFIRPIPTWDEWPEFARETFQAFRTTDVGRKLIIDQNVFIEGTLPMGVVRPLTEVEMDHYREPFLNPVDREPLWRFPNELPIAGEPANIVALVEEYMDWLHQSPVPKLLFWGTDGVLIPPAEAARLAKSLPNCKAVDIGPGLNLLQEDNPDLIGSEIARWLSTLEISG

SEQ ID NO: 2510 - protein, 277 aa, Synthetic construct
MFHYVDVGPRDGTPVLFLHGNPTSSYVWRNIIPHVAPTHRCIAPDLIGMGKSDKPDLGYFFDDHVRFMDAFIEALGLEEVVLVIHDWGSALGFHWAKRNPERVKGIAFMEFIRPIPTWDEWPEFARETFQAFRTTDVGRKLIIDQNVFIEGTLPMGVVRPLTEVEMDHYREPFLNPVDREPLWRFPNELPIAGEPANIVALVEEYMDWLHQSPVPKLLFWGTSGVLIPPAEAARLAKSLPNCKAVDIGPGLNLLQEDNPDLIGSEIARWLSTLEISG

SEQ ID NO: 2511 - protein, 277 aa, Synthetic construct
MFHYVDVGPRDGTPVLFLHGNPTSSYVWRNIIPHVAPTHRCIAPDLIGMGKSDKPDLGYFFDDHVRFMDAFIEALGLEEVVLVIHDWGSALGFHWAKRNPERVKGIAFMEFIRPIPTWDEWPEFARETFQAFRTTDVGRKLIIDQNVFIEGTLPMGVVRPLTEVEMDHYREPFLNPVDREPLWRFPNELPIAGEPANIVALVEEYMDWLHQSPVPKLLFWGTQGVLIPPAEAARLAKSLPNCKAVDIGPGLNLLQEDNPDLIGSEIARWLSTLEISG

SEQ ID NO: 2512 - protein, 277 aa, Synthetic construct
MFHYVDVGPRDGTPVLFLHGNPTSSYVWRNIIPHVAPTHRCIAPDLIGMGKSDKPDLGYFFDDHVRFMDAFIEALGLEEVVLVIHDWGSALGFHWAKRNPERVKGIAFMEFIRPIPTWDEWPEFARETFQAFRTTDVGRKLIIDQNVFIEGTLPMGVVRPLTEVEMDHYREPFLNPVDREPLWRFPNELPIAGEPANIVALVEEYMDWLHQSPVPKLLFWGTPSVLIPPAEAARLAKSLPNCKAVDIGPGLNLLQEDNPDLIGSEIARWLSTLEISG

SEQ ID NO: 2513 - protein, 277 aa, Synthetic construct
MFHYVDVGPRDGTPVLFLHGNPTSSYVWRNIIPHVAPTHRCIAPDLIGMGKSDKPDLGYFFDDHVRFMDAFIEALGLEEVVLVIHDWGSALGFHWAKRNPERVKGIAFMEFIRPIPTWDEWPEFARETFQAFRTTDVGRKLIIDQNVFIEGTLPMGVVRPLTEVEMDHYREPFLNPVDREPLWRFPNELPIAGEPANIVALVEEYMDWLHQSPVPKLLFWGTPAVLIPPAEAARLAKSLPNCKAVDIGPGLNLLQEDNPDLIGSEIARWLSTLEISG

SEQ ID NO: 2514 - protein, 277 aa, Synthetic construct
MFHYVDVGPRDGTPVLFLHGNPTSSYVWRNIIPHVAPTHRCIAPDLIGMGKSDKPDLGYFFDDHVRFMDAFIEALGLEEVVLVIHDWGSALGFHWAKRNPERVKGIAFMEFIRPIPTWDEWPEFARETFQAFRTTDVGRKLIIDQNVFIEGTLPMGVVRPLTEVEMDHYREPFLNPVDREPLWRFPNELPIAGEPANIVALVEEYMDWLHQSPVPKLLFWGTPDVLIPPAEAARLAKSLPNCKAVDIGPGLNLLQEDNPDLIGSEIARWLSTLEISG

SEQ ID NO: 2515 - protein, 277 aa, Synthetic construct
MFHYVDVGPRDGTPVLFLHGNPTSSYVWRNIIPHVAPTHRCIAPDLIGMGKSDKPDLGYFFDDHVRFMDAFIEALGLEEVVLVIHDWGSALGFHWAKRNPERVKGIAFMEFIRPIPTWDEWPEFARETFQAFRTTDVGRKLIIDQNVFIEGTLPMGVVRPLTEVEMDHYREPFLNPVDREPLWRFPNELPIAGEPANIVALVEEYMDWLHQSPVPKLLFWGTPNVLIPPAEAARLAKSLPNCKAVDIGPGLNLLQEDNPDLIGSEIARWLSTLEISG

SEQ ID NO: 2516 - protein, 277 aa, Synthetic construct
MFHYVDVGPRDGTPVLFLHGNPTSSYVWRNIIPHVAPTHRCIAPDLIGMGKSDKPDLGYFFDDHVRFMDAFIEALGLEEVVLVIHDWGSALGFHWAKRNPERVKGIAFMEFIRPIPTWDEWPEFARETFQAFRTTDVGRKLIIDQNVFIEGTLPMGVVRPLTEVEMDHYREPFLNPVDREPLWRFPNELPIAGEPANIVALVEEYMDWLHQSPVPKLLFWGTPTVLIPPAEAARLAKSLPNCKAVDIGPGLNLLQEDNPDLIGSEIARWLSTLEISG

SEQ ID NO: 2517 - protein, 277 aa, Synthetic construct
MFHYVDVGPRDGTPVLFLHGNPTSSYVWRNIIPHVAPTHRCIAPDLIGMGKSDKPDLGYFFDDHVRFMDAFIEALGLEEVVLVIHDWGSALGFHWAKRNPERVKGIAFMEFIRPIPTWDEWPEFARETFQAFRTTDVGRKLIIDQNVFIEGTLPMGVVRPLTEVEMDHYREPFLNPVDREPLWRFPNELPIAGEPANIVALVEEYMDWLHQSPVPKLLFWGTPPVLIPPAEAARLAKSLPNCKAVDIGPGLNLLQEDNPDLIGSEIARWLSTLEISG

SEQ ID NO: 2518 - protein, 277 aa, Synthetic construct
MFHYVDVGPRDGTPVLFLHGNPTSSYVWRNIIPHVAPTHRCIAPDLIGMGKSDKPDLGYFFDDHVRFMDAFIEALGLEEVVLVIHDWGSALGFHWAKRNPERVKGIAFMEFIRPIPTWDEWPEFARETFQAFRTTDVGRKLIIDQNVFIEGTLPMGVVRPLTEVEMDHYREPFLNPVDREPLWRFPNELPIAGEPANIVALVEEYMDWLHQSPVPKLLFWGTPGALIPPAEAARLAKSLPNCKAVDIGPGLNLLQEDNPDLIGSEIARWLSTLEISG

SEQ ID NO: 2519 - protein, 277 aa, Synthetic construct
MFHYVDVGPRDGTPVLFLHGNPTSSYVWRNIIPHVAPTHRCIAPDLIGMGKSDKPDLGYFFDDHVRFMDAFIEALGLEEVVLVIHDWGSALGFHWAKRNPERVKGIAFMEFIRPIPTWDEWPEFARETFQAFRTTDVGRKLIIDQNVFIEGTLPMGVVRPLTEVEMDHYREPFLNPVDREPLWRFPNELPIAGEPANIVALVEEYMDWLHQSPVPKLLFWGTPGSLIPPAEAARLAKSLPNCKAVDIGPGLNLLQEDNPDLIGSEIARWLSTLEISG

SEQ ID NO: 2520 - protein, 277 aa, Synthetic construct
MFHYVDVGPRDGTPVLFLHGNPTSSYVWRNIIPHVAPTHRCIAPDLIGMGKSDKPDLGYFFDDHVRFMDAFIEALGLEEVVLVIHDWGSALGFHWAKRNPERVKGIAFMEFIRPIPTWDEWPEFARETFQAFRTTDVGRKLIIDQNVFIEGTLPMGVVRPLTEVEMDHYREPFLNPVDREPLWRFPNELPIAGEPANIVALVEEYMDWLHQSPVPKLLFWGTPGTLIPPAEAARLAKSLPNCKAVDIGPGLNLLQEDNPDLIGSEIARWLSTLEISG

SEQ ID NO: 2521 - protein, 277 aa, Synthetic construct
MFHYVDVGPRDGTPVLFLHGNPTSSYVWRNIIPHVAPTHRCIAPDLIGMGKSDKPDLGYFFDDHVRFMDAFIEALGLEEVVLVIHDWGSALGFHWAKRNPERVKGIAFMEFIRPIPTWDEWPEFARETFQAFRTTDVGRKLIIDQNVFIEGTLPMGVVRPLTEVEMDHYREPFLNPVDREPLWRFPNELPIAGEPANIVALVEEYMDWLHQSPVPKLLFWGTPGGLIPPAEAARLAKSLPNCKAVDIGPGLNLLQEDNPDLIGSEIARWLSTLEISG

SEQ ID NO: 2522 - protein, 277 aa, Synthetic construct
MFHYVDVGPRDGTPVLFLHGNPTSSYVWRNIIPHVAPTHRCIAPDLIGMGKSDKPDLGYFFDDHVRFMDAFIEALGLEEVVLVIHDWGSALGFHWAKRNPERVKGIAFMEFIRPIPTWDEWPEFARETFQAFRTTDVGRKLIIDQNVFIEGTLPMGVVRPLTEVEMDHYREPFLNPVDREPLWRFPNELPIAGEPANIVALVEEYMDWLHQSPVPKLLFWGTPGPLIPPAEAARLAKSLPNCKAVDIGPGLNLLQEDNPDLIGSEIARWLSTLEISG

SEQ ID NO: 2523 - protein, 277 aa, Synthetic construct
MFHYVDVGPRDGTPVLFLHGNPTSSYVWRNIIPHVAPTHRCIAPDLIGMGKSDKPDLGYFFDDHVRFMDAFIEALGLEEVVLVIHDWGSALGFHWAKRNPERVKGIAFMEFIRPIPTWDEWPEFARETFQAFRTTDVGRKLIIDQNVFIEGTLPMGVVRPLTEVEMDHYREPFLNPVDREPLWRFPNELPIAGEPANIVALVEEYMDWLHQSPVPKLLFWGTPGRLIPPAEAARLAKSLPNCKAVDIGPGLNLLQEDNPDLIGSEIARWLSTLEISG

SEQ ID NO: 2524 - protein, 277 aa, Synthetic construct
MFHYVDVGPRDGTPVLFLHGNPTSSYVWRNIIPHVAPTHRCIAPDLIGMGKSDKPDLGYFFDDHVRFMDAFIEALGLEEVVLVIHDWGSALGFHWAKRNPERVKGIAFMEFIRPIPTWDEWPEFARETFQAFRTTDVGRKLIIDQNVFIEGTLPMGVVRPLTEVEMDHYREPFLNPVDREPLWRFPNELPIAGEPANIVALVEEYMDWLHQSPVPKLLFWGTPGVIIPPAEAARLAKSLPNCKAVDIGPGLNLLQEDNPDLIGSEIARWLSTLEISG

SEQ ID NO: 2525 - protein, 277 aa, Synthetic construct
MFHYVDVGPRDGTPVLFLHGNPTSSYVWRNIIPHVAPTHRCIAPDLIGMGKSDKPDLGYFFDDHVRFMDAFIEALGLEEVVLVIHDWGSALGFHWAKRNPERVKGIAFMEFIRPIPTWDEWPEFARETFQAFRTTDVGRKLIIDQNVFIEGTLPMGVVRPLTEVEMDHYREPFLNPVDREPLWRFPNELPIAGEPANIVALVEEYMDWLHQSPVPKLLFWGTPGVVIPPAEAARLAKSLPNCKAVDIGPGLNLLQEDNPDLIGSEIARWLSTLEISG

SEQ ID NO: 2526 - protein, 277 aa, Synthetic construct
MFHYVDVGPRDGTPVLFLHGNPTSSYVWRNIIPHVAPTHRCIAPDLIGMGKSDKPDLGYFFDDHVRFMDAFIEALGLEEVVLVIHDWGSALGFHWAKRNPERVKGIAFMEFIRPIPTWDEWPEFARETFQAFRTTDVGRKLIIDQNVFIEGTLPMGVVRPLTEVEMDHYREPFLNPVDREPLWRFPNELPIAGEPANIVALVEEYMDWLHQSPVPKLLFWGTPGVFIPPAEAARLAKSLPNCKAVDIGPGLNLLQEDNPDLIGSEIARWLSTLEISG

SEQ ID NO: 2527 - protein, 277 aa, Synthetic construct
MFHYVDVGPRDGTPVLFLHGNPTSSYVWRNIIPHVAPTHRCIAPDLIGMGKSDKPDLGYFFDDHVRFMDAFIEALGLEEVVLVIHDWGSALGFHWAKRNPERVKGIAFMEFIRPIPTWDEWPEFARETFQAFRTTDVGRKLIIDQNVFIEGTLPMGVVRPLTEVEMDHYREPFLNPVDREPLWRFPNELPIAGEPANIVALVEEYMDWLHQSPVPKLLFWGTPGVMIPPAEAARLAKSLPNCKAVDIGPGLNLLQEDNPDLIGSEIARWLSTLEISG

SEQ ID NO: 2528 - protein, 277 aa, Synthetic construct
MFHYVDVGPRDGTPVLFLHGNPTSSYVWRNIIPHVAPTHRCIAPDLIGMGKSDKPDLGYFFDDHVRFMDAFIEALGLEEVVLVIHDWGSALGFHWAKRNPERVKGIAFMEFIRPIPTWDEWPEFARETFQAFRTTDVGRKLIIDQNVFIEGTLPMGVVRPLTEVEMDHYREPFLNPVDREPLWRFPNELPIAGEPANIVALVEEYMDWLHQSPVPKLLFWGTPGVAIPPAEAARLAKSLPNCKAVDIGPGLNLLQEDNPDLIGSEIARWLSTLEISG

SEQ ID NO: 2529 - protein, 277 aa, Synthetic construct
MFHYVDVGPRDGTPVLFLHGNPTSSYVWRNIIPHVAPTHRCIAPDLIGMGKSDKPDLGYFFDDHVRFMDAFIEALGLEEVVLVIHDWGSALGFHWAKRNPERVKGIAFMEFIRPIPTWDEWPEFARETFQAFRTTDVGRKLIIDQNVFIEGTLPMGVVRPLTEVEMDHYREPFLNPVDREPLWRFPNELPIAGEPANIVALVEEYMDWLHQSPVPKLLFWGTPGVTIPPAEAARLAKSLPNCKAVDIGPGLNLLQEDNPDLIGSEIARWLSTLEISG

SEQ ID NO: 2530 - protein, 277 aa, Synthetic construct
MFHYVDVGPRDGTPVLFLHGNPTSSYVWRNIIPHVAPTHRCIAPDLIGMGKSDKPDLGYFFDDHVRFMDAFIEALGLEEVVLVIHDWGSALGFHWAKRNPERVKGIAFMEFIRPIPTWDEWPEFARETFQAFRTTDVGRKLIIDQNVFIEGTLPMGVVRPLTEVEMDHYREPFLNPVDREPLWRFPNELPIAGEPANIVALVEEYMDWLHQSPVPKLLFWGTPGVLLPPAEAARLAKSLPNCKAVDIGPGLNLLQEDNPDLIGSEIARWLSTLEISG

SEQ ID NO: 2531 - protein, 277 aa, Synthetic construct
MFHYVDVGPRDGTPVLFLHGNPTSSYVWRNIIPHVAPTHRCIAPDLIGMGKSDKPDLGYFFDDHVRFMDAFIEALGLEEVVLVIHDWGSALGFHWAKRNPERVKGIAFMEFIRPIPTWDEWPEFARETFQAFRTTDVGRKLIIDQNVFIEGTLPMGVVRPLTEVEMDHYREPFLNPVDREPLWRFPNELPIAGEPANIVALVEEYMDWLHQSPVPKLLFWGTPGVLFPPAEAARLAKSLPNCKAVDIGPGLNLLQEDNPDLIGSEIARWLSTLEISG

SEQ ID NO: 2532 - protein, 277 aa, Synthetic construct
MFHYVDVGPRDGTPVLFLHGNPTSSYVWRNIIPHVAPTHRCIAPDLIGMGKSDKPDLGYFFDDHVRFMDAFIEALGLEEVVLVIHDWGSALGFHWAKRNPERVKGIAFMEFIRPIPTWDEWPEFARETFQAFRTTDVGRKLIIDQNVFIEGTLPMGVVRPLTEVEMDHYREPFLNPVDREPLWRFPNELPIAGEPANIVALVEEYMDWLHQSPVPKLLFWGTPGVLMPPAEAARLAKSLPNCKAVDIGPGLNLLQEDNPDLIGSEIARWLSTLEISG

SEQ ID NO: 2533 - protein, 277 aa, Synthetic construct
MFHYVDVGPRDGTPVLFLHGNPTSSYVWRNIIPHVAPTHRCIAPDLIGMGKSDKPDLGYFFDDHVRFMDAFIEALGLEEVVLVIHDWGSALGFHWAKRNPERVKGIAFMEFIRPIPTWDEWPEFARETFQAFRTTDVGRKLIIDQNVFIEGTLPMGVVRPLTEVEMDHYREPFLNPVDREPLWRFPNELPIAGEPANIVALVEEYMDWLHQSPVPKLLFWGTPGVLVPPAEAARLAKSLPNCKAVDIGPGLNLLQEDNPDLIGSEIARWLSTLEISG

SEQ ID NO: 2534 - protein, 277 aa, Synthetic construct
MFHYVDVGPRDGTPVLFLHGNPTSSYVWRNIIPHVAPTHRCIAPDLIGMGKSDKPDLGYFFDDHVRFMDAFIEALGLEEVVLVIHDWGSALGFHWAKRNPERVKGIAFMEFIRPIPTWDEWPEFARETFQAFRTTDVGRKLIIDQNVFIEGTLPMGVVRPLTEVEMDHYREPFLNPVDREPLWRFPNELPIAGEPANIVALVEEYMDWLHQSPVPKLLFWGTPGVLAPPAEAARLAKSLPNCKAVDIGPGLNLLQEDNPDLIGSEIARWLSTLEISG

SEQ ID NO: 2535 - protein, 277 aa, Synthetic construct
MFHYVDVGPRDGTPVLFLHGNPTSSYVWRNIIPHVAPTHRCIAPDLIGMGKSDKPDLGYFFDDHVRFMDAFIEALGLEEVVLVIHDWGSALGFHWAKRNPERVKGIAFMEFIRPIPTWDEWPEFARETFQAFRTTDVGRKLIIDQNVFIEGTLPMGVVRPLTEVEMDHYREPFLNPVDREPLWRFPNELPIAGEPANIVALVEEYMDWLHQSPVPKLLFWGTPGVLTPPAEAARLAKSLPNCKAVDIGPGLNLLQEDNPDLIGSEIARWLSTLEISG

SEQ ID NO: 2536 - protein, 277 aa, Synthetic construct
MFHYVDVGPRDGTPVLFLHGNPTSSYVWRNIIPHVAPTHRCIAPDLIGMGKSDKPDLGYFFDDHVRFMDAFIEALGLEEVVLVIHDWGSALGFHWAKRNPERVKGIAFMEFIRPIPTWDEWPEFARETFQAFRTTDVGRKLIIDQNVFIEGTLPMGVVRPLTEVEMDHYREPFLNPVDREPLWRFPNELPIAGEPANIVALVEEYMDWLHQSPVPKLLFWGTPGVLITPAEAARLAKSLPNCKAVDIGPGLNLLQEDNPDLIGSEIARWLSTLEISG

SEQ ID NO: 2537 - protein, 277 aa, Synthetic construct
MFHYVDVGPRDGTPVLFLHGNPTSSYVWRNIIPHVAPTHRCIAPDLIGMGKSDKPDLGYFFDDHVRFMDAFIEALGLEEVVLVIHDWGSALGFHWAKRNPERVKGIAFMEFIRPIPTWDEWPEFARETFQAFRTTDVGRKLIIDQNVFIEGTLPMGVVRPLTEVEMDHYREPFLNPVDREPLWRFPNELPIAGEPANIVALVEEYMDWLHQSPVPKLLFWGTPGVLIGPAEAARLAKSLPNCKAVDIGPGLNLLQEDNPDLIGSEIARWLSTLEISG

SEQ ID NO: 2538 - protein, 277 aa, Synthetic construct
MFHYVDVGPRDGTPVLFLHGNPTSSYVWRNIIPHVAPTHRCIAPDLIGMGKSDKPDLGYFFDDHVRFMDAFIEALGLEEVVLVIHDWGSALGFHWAKRNPERVKGIAFMEFIRPIPTWDEWPEFARETFQAFRTTDVGRKLIIDQNVFIEGTLPMGVVRPLTEVEMDHYREPFLNPVDREPLWRFPNELPIAGEPANIVALVEEYMDWLHQSPVPKLLFWGTPGVLISPAEAARLAKSLPNCKAVDIGPGLNLLQEDNPDLIGSEIARWLSTLEISG

SEQ ID NO: 2539 - protein, 277 aa, Synthetic construct
MFHYVDVGPRDGTPVLFLHGNPTSSYVWRNIIPHVAPTHRCIAPDLIGMGKSDKPDLGYFFDDHVRFMDAFIEALGLEEVVLVIHDWGSALGFHWAKRNPERVKGIAFMEFIRPIPTWDEWPEFARETFQAFRTTDVGRKLIIDQNVFIEGTLPMGVVRPLTEVEMDHYREPFLNPVDREPLWRFPNELPIAGEPANIVALVEEYMDWLHQSPVPKLLFWGTPGVLIAPAEAARLAKSLPNCKAVDIGPGLNLLQEDNPDLIGSEIARWLSTLEISG

SEQ ID NO: 2540 - protein, 277 aa, Synthetic construct
MFHYVDVGPRDGTPVLFLHGNPTSSYVWRNIIPHVAPTHRCIAPDLIGMGKSDKPDLGYFFDDHVRFMDAFIEALGLEEVVLVIHDWGSALGFHWAKRNPERVKGIAFMEFIRPIPTWDEWPEFARETFQAFRTTDVGRKLIIDQNVFIEGTLPMGVVRPLTEVEMDHYREPFLNPVDREPLWRFPNELPIAGEPANIVALVEEYMDWLHQSPVPKLLFWGTPGVLIRPAEAARLAKSLPNCKAVDIGPGLNLLQEDNPDLIGSEIARWLSTLEISG

SEQ ID NO: 2541 - protein, 277 aa, Synthetic construct
MFHYVDVGPRDGTPVLFLHGNPTSSYVWRNIIPHVAPTHRCIAPDLIGMGKSDKPDLGYFFDDHVRFMDAFIEALGLEEVVLVIHDWGSALGFHWAKRNPERVKGIAFMEFIRPIPTWDEWPEFARETFQAFRTTDVGRKLIIDQNVFIEGTLPMGVVRPLTEVEMDHYREPFLNPVDREPLWRFPNELPIAGEPANIVALVEEYMDWLHQSPVPKLLFWGTPGVLIKPAEAARLAKSLPNCKAVDIGPGLNLLQEDNPDLIGSEIARWLSTLEISG

SEQ ID NO: 2542 - protein, 277 aa, Synthetic construct
MFHYVDVGPRDGTPVLFLHGNPTSSYVWRNIIPHVAPTHRCIAPDLIGMGKSDKPDLGYFFDDHVRFMDAFIEALGLEEVVLVIHDWGSALGFHWAKRNPERVKGIAFMEFIRPIPTWDEWPEFARETFQAFRTTDVGRKLIIDQNVFIEGTLPMGVVRPLTEVEMDHYREPFLNPVDREPLWRFPNELPIAGEPANIVALVEEYMDWLHQSPVPKLLFWGTPGVLIPAAEAARLAKSLPNCKAVDIGPGLNLLQEDNPDLIGSEIARWLSTLEISG

SEQ ID NO: 2543 - protein, 277 aa, Synthetic construct
MFHYVDVGPRDGTPVLFLHGNPTSSYVWRNIIPHVAPTHRCIAPDLIGMGKSDKPDLGYFFDDHVRFMDAFIEALGLEEVVLVIHDWGSALGFHWAKRNPERVKGIAFMEFIRPIPTWDEWPEFARETFQAFRTTDVGRKLIIDQNVFIEGTLPMGVVRPLTEVEMDHYREPFLNPVDREPLWRFPNELPIAGEPANIVALVEEYMDWLHQSPVPKLLFWGTPGVLIPKAEAARLAKSLPNCKAVDIGPGLNLLQEDNPDLIGSEIARWLSTLEISG

SEQ ID NO: 2544 - protein, 277 aa, Synthetic construct
MFHYVDVGPRDGTPVLFLHGNPTSSYVWRNIIPHVAPTHRCIAPDLIGMGKSDKPDLGYFFDDHVRFMDAFIEALGLEEVVLVIHDWGSALGFHWAKRNPERVKGIAFMEFIRPIPTWDEWPEFARETFQAFRTTDVGRKLIIDQNVFIEGTLPMGVVRPLTEVEMDHYREPFLNPVDREPLWRFPNELPIAGEPANIVALVEEYMDWLHQSPVPKLLFWGTPGVLIPRAEAARLAKSLPNCKAVDIGPGLNLLQEDNPDLIGSEIARWLSTLEISG

SEQ ID NO: 2545 - protein, 277 aa, Synthetic construct
MFHYVDVGPRDGTPVLFLHGNPTSSYVWRNIIPHVAPTHRCIAPDLIGMGKSDKPDLGYFFDDHVRFMDAFIEALGLEEVVLVIHDWGSALGFHWAKRNPERVKGIAFMEFIRPIPTWDEWPEFARETFQAFRTTDVGRKLIIDQNVFIEGTLPMGVVRPLTEVEMDHYREPFLNPVDREPLWRFPNELPIAGEPANIVALVEEYMDWLHQSPVPKLLFWGTPGVLIPEAEAARLAKSLPNCKAVDIGPGLNLLQEDNPDLIGSEIARWLSTLEISG

SEQ ID NO: 2546 - protein, 277 aa, Synthetic construct
MFHYVDVGPRDGTPVLFLHGNPTSSYVWRNIIPHVAPTHRCIAPDLIGMGKSDKPDLGYFFDDHVRFMDAFIEALGLEEVVLVIHDWGSALGFHWAKRNPERVKGIAFMEFIRPIPTWDEWPEFARETFQAFRTTDVGRKLIIDQNVFIEGTLPMGVVRPLTEVEMDHYREPFLNPVDREPLWRFPNELPIAGEPANIVALVEEYMDWLHQSPVPKLLFWGTPGVLIPQAEAARLAKSLPNCKAVDIGPGLNLLQEDNPDLIGSEIARWLSTLEISG

SEQ ID NO: 2547 - protein, 277 aa, Synthetic construct
MFHYVDVGPRDGTPVLFLHGNPTSSYVWRNIIPHVAPTHRCIAPDLIGMGKSDKPDLGYFFDDHVRFMDAFIEALGLEEVVLVIHDWGSALGFHWAKRNPERVKGIAFMEFIRPIPTWDEWPEFARETFQAFRTTDVGRKLIIDQNVFIEGTLPMGVVRPLTEVEMDHYREPFLNPVDREPLWRFPNELPIAGEPANIVALVEEYMDWLHQSPVPKLLFWGTPGVLIPVAEAARLAKSLPNCKAVDIGPGLNLLQEDNPDLIGSEIARWLSTLEISG

SEQ ID NO: 2548 - protein, 277 aa, Synthetic construct
MFHYVDVGPRDGTPVLFLHGNPTSSYVWRNIIPHVAPTHRCIAPDLIGMGKSDKPDLGYFFDDHVRFMDAFIEALGLEEVVLVIHDWGSALGFHWAKRNPERVKGIAFMEFIRPIPTWDEWPEFARETFQAFRTTDVGRKLIIDQNVFIEGTLPMGVVRPLTEVEMDHYREPFLNPVDREPLWRFPNELPIAGEPANIVALVEEYMDWLHQSPVPKLLFWGTPGVLIPPEEAARLAKSLPNCKAVDIGPGLNLLQEDNPDLIGSEIARWLSTLEISG

SEQ ID NO: 2549 - protein, 277 aa, Synthetic construct
MFHYVDVGPRDGTPVLFLHGNPTSSYVWRNIIPHVAPTHRCIAPDLIGMGKSDKPDLGYFFDDHVRFMDAFIEALGLEEVVLVIHDWGSALGFHWAKRNPERVKGIAFMEFIRPIPTWDEWPEFARETFQAFRTTDVGRKLIIDQNVFIEGTLPMGVVRPLTEVEMDHYREPFLNPVDREPLWRFPNELPIAGEPANIVALVEEYMDWLHQSPVPKLLFWGTPGVLIPPDEAARLAKSLPNCKAVDIGPGLNLLQEDNPDLIGSEIARWLSTLEISG

SEQ ID NO: 2550 - protein, 277 aa, Synthetic construct
MFHYVDVGPRDGTPVLFLHGNPTSSYVWRNIIPHVAPTHRCIAPDLIGMGKSDKPDLGYFFDDHVRFMDAFIEALGLEEVVLVIHDWGSALGFHWAKRNPERVKGIAFMEFIRPIPTWDEWPEFARETFQAFRTTDVGRKLIIDQNVFIEGTLPMGVVRPLTEVEMDHYREPFLNPVDREPLWRFPNELPIAGEPANIVALVEEYMDWLHQSPVPKLLFWGTPGVLIPPSEAARLAKSLPNCKAVDIGPGLNLLQEDNPDLIGSEIARWLSTLEISG

SEQ ID NO: 2551 - protein, 277 aa, Synthetic construct
MFHYVDVGPRDGTPVLFLHGNPTSSYVWRNIIPHVAPTHRCIAPDLIGMGKSDKPDLGYFFDDHVRFMDAFIEALGLEEVVLVIHDWGSALGFHWAKRNPERVKGIAFMEFIRPIPTWDEWPEFARETFQAFRTTDVGRKLIIDQNVFIEGTLPMGVVRPLTEVEMDHYREPFLNPVDREPLWRFPNELPIAGEPANIVALVEEYMDWLHQSPVPKLLFWGTPGVLIPPGEAARLAKSLPNCKAVDIGPGLNLLQEDNPDLIGSEIARWLSTLEISG

SEQ ID NO: 2552 - protein, 277 aa, Synthetic construct
MFHYVDVGPRDGTPVLFLHGNPTSSYVWRNIIPHVAPTHRCIAPDLIGMGKSDKPDLGYFFDDHVRFMDAFIEALGLEEVVLVIHDWGSALGFHWAKRNPERVKGIAFMEFIRPIPTWDEWPEFARETFQAFRTTDVGRKLIIDQNVFIEGTLPMGVVRPLTEVEMDHYREPFLNPVDREPLWRFPNELPIAGEPANIVALVEEYMDWLHQSPVPKLLFWGTPGVLIPPPEAARLAKSLPNCKAVDIGPGLNLLQEDNPDLIGSEIARWLSTLEISG

SEQ ID NO: 2553 - protein, 277 aa, Synthetic construct
MFHYVDVGPRDGTPVLFLHGNPTSSYVWRNIIPHVAPTHRCIAPDLIGMGKSDKPDLGYFFDDHVRFMDAFIEALGLEEVVLVIHDWGSALGFHWAKRNPERVKGIAFMEFIRPIPTWDEWPEFARETFQAFRTTDVGRKLIIDQNVFIEGTLPMGVVRPLTEVEMDHYREPFLNPVDREPLWRFPNELPIAGEPANIVALVEEYMDWLHQSPVPKLLFWGTPGVLIPPKEAARLAKSLPNCKAVDIGPGLNLLQEDNPDLIGSEIARWLSTLEISG

SEQ ID NO: 2554 - protein, 277 aa, Synthetic construct
MFHYVDVGPRDGTPVLFLHGNPTSSYVWRNIIPHVAPTHRCIAPDLIGMGKSDKPDLGYFFDDHVRFMDAFIEALGLEEVVLVIHDWGSALGFHWAKRNPERVKGIAFMEFIRPIPTWDEWPEFARETFQAFRTTDVGRKLIIDQNVFIEGTLPMGVVRPLTEVEMDHYREPFLNPVDREPLWRFPNELPIAGEPANIVALVEEYMDWLHQSPVPKLLFWGTPGVLIPPAAAARLAKSLPNCKAVDIGPGLNLLQEDNPDLIGSEIARWLSTLEISG

SEQ ID NO: 2555 - protein, 277 aa, Synthetic construct
MFHYVDVGPRDGTPVLFLHGNPTSSYVWRNIIPHVAPTHRCIAPDLIGMGKSDKPDLGYFFDDHVRFMDAFIEALGLEEVVLVIHDWGSALGFHWAKRNPERVKGIAFMEFIRPIPTWDEWPEFARETFQAFRTTDVGRKLIIDQNVFIEGTLPMGVVRPLTEVEMDHYREPFLNPVDREPLWRFPNELPIAGEPANIVALVEEYMDWLHQSPVPKLLFWGTPGVLIPPAVAARLAKSLPNCKAVDIGPGLNLLQEDNPDLIGSEIARWLSTLEISG

SEQ ID NO: 2556 - protein, 277 aa, Synthetic construct
MFHYVDVGPRDGTPVLFLHGNPTSSYVWRNIIPHVAPTHRCIAPDLIGMGKSDKPDLGYFFDDHVRFMDAFIEALGLEEVVLVIHDWGSALGFHWAKRNPERVKGIAFMEFIRPIPTWDEWPEFARETFQAFRTTDVGRKLIIDQNVFIEGTLPMGVVRPLTEVEMDHYREPFLNPVDREPLWRFPNELPIAGEPANIVALVEEYMDWLHQSPVPKLLFWGTPGVLIPPALAARLAKSLPNCKAVDIGPGLNLLQEDNPDLIGSEIARWLSTLEISG

SEQ ID NO: 2557 - protein, 277 aa, Synthetic construct
MFHYVDVGPRDGTPVLFLHGNPTSSYVWRNIIPHVAPTHRCIAPDLIGMGKSDKPDLGYFFDDHVRFMDAFIEALGLEEVVLVIHDWGSALGFHWAKRNPERVKGIAFMEFIRPIPTWDEWPEFARETFQAFRTTDVGRKLIIDQNVFIEGTLPMGVVRPLTEVEMDHYREPFLNPVDREPLWRFPNELPIAGEPANIVALVEEYMDWLHQSPVPKLLFWGTPGVLIPPAFAARLAKSLPNCKAVDIGPGLNLLQEDNPDLIGSEIARWLSTLEISG

SEQ ID NO: 2558 - protein, 277 aa, Synthetic construct
MFHYVDVGPRDGTPVLFLHGNPTSSYVWRNIIPHVAPTHRCIAPDLIGMGKSDKPDLGYFFDDHVRFMDAFIEALGLEEVVLVIHDWGSALGFHWAKRNPERVKGIAFMEFIRPIPTWDEWPEFARETFQAFRTTDVGRKLIIDQNVFIEGTLPMGVVRPLTEVEMDHYREPFLNPVDREPLWRFPNELPIAGEPANIVALVEEYMDWLHQSPVPKLLFWGTPGVLIPPAIAARLAKSLPNCKAVDIGPGLNLLQEDNPDLIGSEIARWLSTLEISG

SEQ ID NO: 2559 - protein, 277 aa, Synthetic construct
MFHYVDVGPRDGTPVLFLHGNPTSSYVWRNIIPHVAPTHRCIAPDLIGMGKSDKPDLGYFFDDHVRFMDAFIEALGLEEVVLVIHDWGSALGFHWAKRNPERVKGIAFMEFIRPIPTWDEWPEFARETFQAFRTTDVGRKLIIDQNVFIEGTLPMGVVRPLTEVEMDHYREPFLNPVDREPLWRFPNELPIAGEPANIVALVEEYMDWLHQSPVPKLLFWGTPGVLIPPATAARLAKSLPNCKAVDIGPGLNLLQEDNPDLIGSEIARWLSTLEISG

SEQ ID NO: 2560 - protein, 277 aa, Synthetic construct
MFHYVDVGPRDGTPVLFLHGNPTSSYVWRNIIPHVAPTHRCIAPDLIGMGKSDKPDLGYFFDDHVRFMDAFIEALGLEEVVLVIHDWGSALGFHWAKRNPERVKGIAFMEFIRPIPTWDEWPEFARETFQAFRTTDVGRKLIIDQNVFIEGTLPMGVVRPLTEVEMDHYREPFLNPVDREPLWRFPNELPIAGEPANIVALVEEYMDWLHQSPVPKLLFWGTPGVLIPPAEVARLAKSLPNCKAVDIGPGLNLLQEDNPDLIGSEIARWLSTLEISG

SEQ ID NO: 2561 - protein, 277 aa, Synthetic construct
MFHYVDVGPRDGTPVLFLHGNPTSSYVWRNIIPHVAPTHRCIAPDLIGMGKSDKPDLGYFFDDHVRFMDAFIEALGLEEVVLVIHDWGSALGFHWAKRNPERVKGIAFMEFIRPIPTWDEWPEFARETFQAFRTTDVGRKLIIDQNVFIEGTLPMGVVRPLTEVEMDHYREPFLNPVDREPLWRFPNELPIAGEPANIVALVEEYMDWLHQSPVPKLLFWGTPGVLIPPAEMARLAKSLPNCKAVDIGPGLNLLQEDNPDLIGSEIARWLSTLEISG

SEQ ID NO: 2562 - protein, 277 aa, Synthetic construct
MFHYVDVGPRDGTPVLFLHGNPTSSYVWRNIIPHVAPTHRCIAPDLIGMGKSDKPDLGYFFDDHVRFMDAFIEALGLEEVVLVIHDWGSALGFHWAKRNPERVKGIAFMEFIRPIPTWDEWPEFARETFQAFRTTDVGRKLIIDQNVFIEGTLPMGVVRPLTEVEMDHYREPFLNPVDREPLWRFPNELPIAGEPANIVALVEEYMDWLHQSPVPKLLFWGTPGVLIPPAEGARLAKSLPNCKAVDIGPGLNLLQEDNPDLIGSEIARWLSTLEISG

SEQ ID NO: 2563 - protein, 277 aa, Synthetic construct
MFHYVDVGPRDGTPVLFLHGNPTSSYVWRNIIPHVAPTHRCIAPDLIGMGKSDKPDLGYFFDDHVRFMDAFIEALGLEEVVLVIHDWGSALGFHWAKRNPERVKGIAFMEFIRPIPTWDEWPEFARETFQAFRTTDVGRKLIIDQNVFIEGTLPMGVVRPLTEVEMDHYREPFLNPVDREPLWRFPNELPIAGEPANIVALVEEYMDWLHQSPVPKLLFWGTPGVLIPPAETARLAKSLPNCKAVDIGPGLNLLQEDNPDLIGSEIARWLSTLEISG

SEQ ID NO: 2564 - protein, 277 aa, Synthetic construct
MFHYVDVGPRDGTPVLFLHGNPTSSYVWRNIIPHVAPTHRCIAPDLIGMGKSDKPDLGYFFDDHVRFMDAFIEALGLEEVVLVIHDWGSALGFHWAKRNPERVKGIAFMEFIRPIPTWDEWPEFARETFQAFRTTDVGRKLIIDQNVFIEGTLPMGVVRPLTEVEMDHYREPFLNPVDREPLWRFPNELPIAGEPANIVALVEEYMDWLHQSPVPKLLFWGTPGVLIPPAELARLAKSLPNCKAVDIGPGLNLLQEDNPDLIGSEIARWLSTLEISG

SEQ ID NO: 2565 - protein, 277 aa, Synthetic construct
MFHYVDVGPRDGTPVLFLHGNPTSSYVWRNIIPHVAPTHRCIAPDLIGMGKSDKPDLGYFFDDHVRFMDAFIEALGLEEVVLVIHDWGSALGFHWAKRNPERVKGIAFMEFIRPIPTWDEWPEFARETFQAFRTTDVGRKLIIDQNVFIEGTLPMGVVRPLTEVEMDHYREPFLNPVDREPLWRFPNELPIAGEPANIVALVEEYMDWLHQSPVPKLLFWGTPGVLIPPAERARLAKSLPNCKAVDIGPGLNLLQEDNPDLIGSEIARWLSTLEISG

SEQ ID NO: 2566 - protein, 277 aa, Synthetic construct
MFHYVDVGPRDGTPVLFLHGNPTSSYVWRNIIPHVAPTHRCIAPDLIGMGKSDKPDLGYFFDDHVRFMDAFIEALGLEEVVLVIHDWGSALGFHWAKRNPERVKGIAFMEFIRPIPTWDEWPEFARETFQAFRTTDVGRKLIIDQNVFIEGTLPMGVVRPLTEVEMDHYREPFLNPVDREPLWRFPNELPIAGEPANIVALVEEYMDWLHQSPVPKLLFWGTPGVLIPPAEAERLAKSLPNCKAVDIGPGLNLLQEDNPDLIGSEIARWLSTLEISG

SEQ ID NO: 2567 - protein, 277 aa, Synthetic construct
MFHYVDVGPRDGTPVLFLHGNPTSSYVWRNIIPHVAPTHRCIAPDLIGMGKSDKPDLGYFFDDHVRFMDAFIEALGLEEVVLVIHDWGSALGFHWAKRNPERVKGIAFMEFIRPIPTWDEWPEFARETFQAFRTTDVGRKLIIDQNVFIEGTLPMGVVRPLTEVEMDHYREPFLNPVDREPLWRFPNELPIAGEPANIVALVEEYMDWLHQSPVPKLLFWGTPGVLIPPAEARRLAKSLPNCKAVDIGPGLNLLQEDNPDLIGSEIARWLSTLEISG

SEQ ID NO: 2568 - protein, 277 aa, Synthetic construct
MFHYVDVGPRDGTPVLFLHGNPTSSYVWRNIIPHVAPTHRCIAPDLIGMGKSDKPDLGYFFDDHVRFMDAFIEALGLEEVVLVIHDWGSALGFHWAKRNPERVKGIAFMEFIRPIPTWDEWPEFARETFQAFRTTDVGRKLIIDQNVFIEGTLPMGVVRPLTEVEMDHYREPFLNPVDREPLWRFPNELPIAGEPANIVALVEEYMDWLHQSPVPKLLFWGTPGVLIPPAEADRLAKSLPNCKAVDIGPGLNLLQEDNPDLIGSEIARWLSTLEISG

SEQ ID NO: 2569 - protein, 277 aa, Synthetic construct
MFHYVDVGPRDGTPVLFLHGNPTSSYVWRNIIPHVAPTHRCIAPDLIGMGKSDKPDLGYFFDDHVRFMDAFIEALGLEEVVLVIHDWGSALGFHWAKRNPERVKGIAFMEFIRPIPTWDEWPEFARETFQAFRTTDVGRKLIIDQNVFIEGTLPMGVVRPLTEVEMDHYREPFLNPVDREPLWRFPNELPIAGEPANIVALVEEYMDWLHQSPVPKLLFWGTPGVLIPPAEAQRLAKSLPNCKAVDIGPGLNLLQEDNPDLIGSEIARWLSTLEISG

SEQ ID NO: 2570 - protein, 277 aa, Synthetic construct
MFHYVDVGPRDGTPVLFLHGNPTSSYVWRNIIPHVAPTHRCIAPDLIGMGKSDKPDLGYFFDDHVRFMDAFIEALGLEEVVLVIHDWGSALGFHWAKRNPERVKGIAFMEFIRPIPTWDEWPEFARETFQAFRTTDVGRKLIIDQNVFIEGTLPMGVVRPLTEVEMDHYREPFLNPVDREPLWRFPNELPIAGEPANIVALVEEYMDWLHQSPVPKLLFWGTPGVLIPPAEAKRLAKSLPNCKAVDIGPGLNLLQEDNPDLIGSEIARWLSTLEISG

SEQ ID NO: 2571 - protein, 277 aa, Synthetic construct
MFHYVDVGPRDGTPVLFLHGNPTSSYVWRNIIPHVAPTHRCIAPDLIGMGKSDKPDLGYFFDDHVRFMDAFIEALGLEEVVLVIHDWGSALGFHWAKRNPERVKGIAFMEFIRPIPTWDEWPEFARETFQAFRTTDVGRKLIIDQNVFIEGTLPMGVVRPLTEVEMDHYREPFLNPVDREPLWRFPNELPIAGEPANIVALVEEYMDWLHQSPVPKLLFWGTPGVLIPPAEATRLAKSLPNCKAVDIGPGLNLLQEDNPDLIGSEIARWLSTLEISG

SEQ ID NO: 2572 - protein, 277 aa, Synthetic construct
MFHYVDVGPRDGTPVLFLHGNPTSSYVWRNIIPHVAPTHRCIAPDLIGMGKSDKPDLGYFFDDHVRFMDAFIEALGLEEVVLVIHDWGSALGFHWAKRNPERVKGIAFMEFIRPIPTWDEWPEFARETFQAFRTTDVGRKLIIDQNVFIEGTLPMGVVRPLTEVEMDHYREPFLNPVDREPLWRFPNELPIAGEPANIVALVEEYMDWLHQSPVPKLLFWGTPGVLIPPAEAAWLAKSLPNCKAVDIGPGLNLLQEDNPDLIGSEIARWLSTLEISG

SEQ ID NO: 2573 - protein, 277 aa, Synthetic construct
MFHYVDVGPRDGTPVLFLHGNPTSSYVWRNIIPHVAPTHRCIAPDLIGMGKSDKPDLGYFFDDHVRFMDAFIEALGLEEVVLVIHDWGSALGFHWAKRNPERVKGIAFMEFIRPIPTWDEWPEFARETFQAFRTTDVGRKLIIDQNVFIEGTLPMGVVRPLTEVEMDHYREPFLNPVDREPLWRFPNELPIAGEPANIVALVEEYMDWLHQSPVPKLLFWGTPGVLIPPAEAAALAKSLPNCKAVDIGPGLNLLQEDNPDLIGSEIARWLSTLEISG

SEQ ID NO: 2574 - protein, 277 aa, Synthetic construct
MFHYVDVGPRDGTPVLFLHGNPTSSYVWRNIIPHVAPTHRCIAPDLIGMGKSDKPDLGYFFDDHVRFMDAFIEALGLEEVVLVIHDWGSALGFHWAKRNPERVKGIAFMEFIRPIPTWDEWPEFARETFQAFRTTDVGRKLIIDQNVFIEGTLPMGVVRPLTEVEMDHYREPFLNPVDREPLWRFPNELPIAGEPANIVALVEEYMDWLHQSPVPKLLFWGTPGVLIPPAEAAELAKSLPNCKAVDIGPGLNLLQEDNPDLIGSEIARWLSTLEISG

SEQ ID NO: 2575 - protein, 277 aa, Synthetic construct
MFHYVDVGPRDGTPVLFLHGNPTSSYVWRNIIPHVAPTHRCIAPDLIGMGKSDKPDLGYFFDDHVRFMDAFIEALGLEEVVLVIHDWGSALGFHWAKRNPERVKGIAFMEFIRPIPTWDEWPEFARETFQAFRTTDVGRKLIIDQNVFIEGTLPMGVVRPLTEVEMDHYREPFLNPVDREPLWRFPNELPIAGEPANIVALVEEYMDWLHQSPVPKLLFWGTPGVLIPPAEAADLAKSLPNCKAVDIGPGLNLLQEDNPDLIGSEIARWLSTLEISG

SEQ ID NO: 2576 - protein, 277 aa, Synthetic construct
MFHYVDVGPRDGTPVLFLHGNPTSSYVWRNIIPHVAPTHRCIAPDLIGMGKSDKPDLGYFFDDHVRFMDAFIEALGLEEVVLVIHDWGSALGFHWAKRNPERVKGIAFMEFIRPIPTWDEWPEFARETFQAFRTTDVGRKLIIDQNVFIEGTLPMGVVRPLTEVEMDHYREPFLNPVDREPLWRFPNELPIAGEPANIVALVEEYMDWLHQSPVPKLLFWGTPGVLIPPAEAAYLAKSLPNCKAVDIGPGLNLLQEDNPDLIGSEIARWLSTLEISG

SEQ ID NO: 2577 - protein, 277 aa, Synthetic construct
MFHYVDVGPRDGTPVLFLHGNPTSSYVWRNIIPHVAPTHRCIAPDLIGMGKSDKPDLGYFFDDHVRFMDAFIEALGLEEVVLVIHDWGSALGFHWAKRNPERVKGIAFMEFIRPIPTWDEWPEFARETFQAFRTTDVGRKLIIDQNVFIEGTLPMGVVRPLTEVEMDHYREPFLNPVDREPLWRFPNELPIAGEPANIVALVEEYMDWLHQSPVPKLLFWGTPGVLIPPAEAAFLAKSLPNCKAVDIGPGLNLLQEDNPDLIGSEIARWLSTLEISG

SEQ ID NO: 2578 - protein, 277 aa, Synthetic construct
MFHYVDVGPRDGTPVLFLHGNPTSSYVWRNIIPHVAPTHRCIAPDLIGMGKSDKPDLGYFFDDHVRFMDAFIEALGLEEVVLVIHDWGSALGFHWAKRNPERVKGIAFMEFIRPIPTWDEWPEFARETFQAFRTTDVGRKLIIDQNVFIEGTLPMGVVRPLTEVEMDHYREPFLNPVDREPLWRFPNELPIAGEPANIVALVEEYMDWLHQSPVPKLLFWGTPGVLIPPAEAARFAKSLPNCKAVDIGPGLNLLQEDNPDLIGSEIARWLSTLEISG

SEQ ID NO: 2579 - protein, 277 aa, Synthetic construct
MFHYVDVGPRDGTPVLFLHGNPTSSYVWRNIIPHVAPTHRCIAPDLIGMGKSDKPDLGYFFDDHVRFMDAFIEALGLEEVVLVIHDWGSALGFHWAKRNPERVKGIAFMEFIRPIPTWDEWPEFARETFQAFRTTDVGRKLIIDQNVFIEGTLPMGVVRPLTEVEMDHYREPFLNPVDREPLWRFPNELPIAGEPANIVALVEEYMDWLHQSPVPKLLFWGTPGVLIPPAEAARIAKSLPNCKAVDIGPGLNLLQEDNPDLIGSEIARWLSTLEISG

SEQ ID NO: 2580 - protein, 277 aa, Synthetic construct
MFHYVDVGPRDGTPVLFLHGNPTSSYVWRNIIPHVAPTHRCIAPDLIGMGKSDKPDLGYFFDDHVRFMDAFIEALGLEEVVLVIHDWGSALGFHWAKRNPERVKGIAFMEFIRPIPTWDEWPEFARETFQAFRTTDVGRKLIIDQNVFIEGTLPMGVVRPLTEVEMDHYREPFLNPVDREPLWRFPNELPIAGEPANIVALVEEYMDWLHQSPVPKLLFWGTPGVLIPPAEAARWAKSLPNCKAVDIGPGLNLLQEDNPDLIGSEIARWLSTLEISG

SEQ ID NO: 2581 - protein, 277 aa, Synthetic construct
MFHYVDVGPRDGTPVLFLHGNPTSSYVWRNIIPHVAPTHRCIAPDLIGMGKSDKPDLGYFFDDHVRFMDAFIEALGLEEVVLVIHDWGSALGFHWAKRNPERVKGIAFMEFIRPIPTWDEWPEFARETFQAFRTTDVGRKLIIDQNVFIEGTLPMGVVRPLTEVEMDHYREPFLNPVDREPLWRFPNELPIAGEPANIVALVEEYMDWLHQSPVPKLLFWGTPGVLIPPAEAARYAKSLPNCKAVDIGPGLNLLQEDNPDLIGSEIARWLSTLEISG

SEQ ID NO: 2582 - protein, 277 aa, Synthetic construct
MFHYVDVGPRDGTPVLFLHGNPTSSYVWRNIIPHVAPTHRCIAPDLIGMGKSDKPDLGYFFDDHVRFMDAFIEALGLEEVVLVIHDWGSALGFHWAKRNPERVKGIAFMEFIRPIPTWDEWPEFARETFQAFRTTDVGRKLIIDQNVFIEGTLPMGVVRPLTEVEMDHYREPFLNPVDREPLWRFPNELPIAGEPANIVALVEEYMDWLHQSPVPKLLFWGTPGVLIPPAEAARVAKSLPNCKAVDIGPGLNLLQEDNPDLIGSEIARWLSTLEISG

SEQ ID NO: 2583 - protein, 277 aa, Synthetic construct
MFHYVDVGPRDGTPVLFLHGNPTSSYVWRNIIPHVAPTHRCIAPDLIGMGKSDKPDLGYFFDDHVRFMDAFIEALGLEEVVLVIHDWGSALGFHWAKRNPERVKGIAFMEFIRPIPTWDEWPEFARETFQAFRTTDVGRKLIIDQNVFIEGTLPMGVVRPLTEVEMDHYREPFLNPVDREPLWRFPNELPIAGEPANIVALVEEYMDWLHQSPVPKLLFWGTPGVLIPPAEAARMAKSLPNCKAVDIGPGLNLLQEDNPDLIGSEIARWLSTLEISG

SEQ ID NO: 2584 - protein, 277 aa, Synthetic construct
MFHYVDVGPRDGTPVLFLHGNPTSSYVWRNIIPHVAPTHRCIAPDLIGMGKSDKPDLGYFFDDHVRFMDAFIEALGLEEVVLVIHDWGSALGFHWAKRNPERVKGIAFMEFIRPIPTWDEWPEFARETFQAFRTTDVGRKLIIDQNVFIEGTLPMGVVRPLTEVEMDHYREPFLNPVDREPLWRFPNELPIAGEPANIVALVEEYMDWLHQSPVPKLLFWGTPGVLIPPAEAARLRKSLPNCKAVDIGPGLNLLQEDNPDLIGSEIARWLSTLEISG

SEQ ID NO: 2585 - protein, 277 aa, Synthetic construct
MFHYVDVGPRDGTPVLFLHGNPTSSYVWRNIIPHVAPTHRCIAPDLIGMGKSDKPDLGYFFDDHVRFMDAFIEALGLEEVVLVIHDWGSALGFHWAKRNPERVKGIAFMEFIRPIPTWDEWPEFARETFQAFRTTDVGRKLIIDQNVFIEGTLPMGVVRPLTEVEMDHYREPFLNPVDREPLWRFPNELPIAGEPANIVALVEEYMDWLHQSPVPKLLFWGTPGVLIPPAEAARLVKSLPNCKAVDIGPGLNLLQEDNPDLIGSEIARWLSTLEISG

SEQ ID NO: 2586 - protein, 277 aa, Synthetic construct
MFHYVDVGPRDGTPVLFLHGNPTSSYVWRNIIPHVAPTHRCIAPDLIGMGKSDKPDLGYFFDDHVRFMDAFIEALGLEEVVLVIHDWGSALGFHWAKRNPERVKGIAFMEFIRPIPTWDEWPEFARETFQAFRTTDVGRKLIIDQNVFIEGTLPMGVVRPLTEVEMDHYREPFLNPVDREPLWRFPNELPIAGEPANIVALVEEYMDWLHQSPVPKLLFWGTPGVLIPPAEAARLQKSLPNCKAVDIGPGLNLLQEDNPDLIGSEIARWLSTLEISG

SEQ ID NO: 2587 - protein, 277 aa, Synthetic construct
MFHYVDVGPRDGTPVLFLHGNPTSSYVWRNIIPHVAPTHRCIAPDLIGMGKSDKPDLGYFFDDHVRFMDAFIEALGLEEVVLVIHDWGSALGFHWAKRNPERVKGIAFMEFIRPIPTWDEWPEFARETFQAFRTTDVGRKLIIDQNVFIEGTLPMGVVRPLTEVEMDHYREPFLNPVDREPLWRFPNELPIAGEPANIVALVEEYMDWLHQSPVPKLLFWGTPGVLIPPAEAARLEKSLPNCKAVDIGPGLNLLQEDNPDLIGSEIARWLSTLEISG

SEQ ID NO: 2588 - protein, 277 aa, Synthetic construct
MFHYVDVGPRDGTPVLFLHGNPTSSYVWRNIIPHVAPTHRCIAPDLIGMGKSDKPDLGYFFDDHVRFMDAFIEALGLEEVVLVIHDWGSALGFHWAKRNPERVKGIAFMEFIRPIPTWDEWPEFARETFQAFRTTDVGRKLIIDQNVFIEGTLPMGVVRPLTEVEMDHYREPFLNPVDREPLWRFPNELPIAGEPANIVALVEEYMDWLHQSPVPKLLFWGTPGVLIPPAEAARLKKSLPNCKAVDIGPGLNLLQEDNPDLIGSEIARWLSTLEISG

SEQ ID NO: 2589 - protein, 277 aa, Synthetic construct
MFHYVDVGPRDGTPVLFLHGNPTSSYVWRNIIPHVAPTHRCIAPDLIGMGKSDKPDLGYFFDDHVRFMDAFIEALGLEEVVLVIHDWGSALGFHWAKRNPERVKGIAFMEFIRPIPTWDEWPEFARETFQAFRTTDVGRKLIIDQNVFIEGTLPMGVVRPLTEVEMDHYREPFLNPVDREPLWRFPNELPIAGEPANIVALVEEYMDWLHQSPVPKLLFWGTPGVLIPPAEAARLSKSLPNCKAVDIGPGLNLLQEDNPDLIGSEIARWLSTLEISG

SEQ ID NO: 2590 - protein, 277 aa, Synthetic construct
MFHYVDVGPRDGTPVLFLHGNPTSSYVWRNIIPHVAPTHRCIAPDLIGMGKSDKPDLGYFFDDHVRFMDAFIEALGLEEVVLVIHDWGSALGFHWAKRNPERVKGIAFMEFIRPIPTWDEWPEFARETFQAFRTTDVGRKLIIDQNVFIEGTLPMGVVRPLTEVEMDHYREPFLNPVDREPLWRFPNELPIAGEPANIVALVEEYMDWLHQSPVPKLLFWGTPGVLIPPAEAARLAESLPNCKAVDIGPGLNLLQEDNPDLIGSEIARWLSTLEISG

SEQ ID NO: 2591 - protein, 277 aa, Synthetic construct
MFHYVDVGPRDGTPVLFLHGNPTSSYVWRNIIPHVAPTHRCIAPDLIGMGKSDKPDLGYFFDDHVRFMDAFIEALGLEEVVLVIHDWGSALGFHWAKRNPERVKGIAFMEFIRPIPTWDEWPEFARETFQAFRTTDVGRKLIIDQNVFIEGTLPMGVVRPLTEVEMDHYREPFLNPVDREPLWRFPNELPIAGEPANIVALVEEYMDWLHQSPVPKLLFWGTPGVLIPPAEAARLAASLPNCKAVDIGPGLNLLQEDNPDLIGSEIARWLSTLEISG

SEQ ID NO: 2592 - protein, 277 aa, Synthetic construct
MFHYVDVGPRDGTPVLFLHGNPTSSYVWRNIIPHVAPTHRCIAPDLIGMGKSDKPDLGYFFDDHVRFMDAFIEALGLEEVVLVIHDWGSALGFHWAKRNPERVKGIAFMEFIRPIPTWDEWPEFARETFQAFRTTDVGRKLIIDQNVFIEGTLPMGVVRPLTEVEMDHYREPFLNPVDREPLWRFPNELPIAGEPANIVALVEEYMDWLHQSPVPKLLFWGTPGVLIPPAEAARLADSLPNCKAVDIGPGLNLLQEDNPDLIGSEIARWLSTLEISG

SEQ ID NO: 2593 - protein, 277 aa, Synthetic construct
MFHYVDVGPRDGTPVLFLHGNPTSSYVWRNIIPHVAPTHRCIAPDLIGMGKSDKPDLGYFFDDHVRFMDAFIEALGLEEVVLVIHDWGSALGFHWAKRNPERVKGIAFMEFIRPIPTWDEWPEFARETFQAFRTTDVGRKLIIDQNVFIEGTLPMGVVRPLTEVEMDHYREPFLNPVDREPLWRFPNELPIAGEPANIVALVEEYMDWLHQSPVPKLLFWGTPGVLIPPAEAARLAQSLPNCKAVDIGPGLNLLQEDNPDLIGSEIARWLSTLEISG

SEQ ID NO: 2594 - protein, 277 aa, Synthetic construct
MFHYVDVGPRDGTPVLFLHGNPTSSYVWRNIIPHVAPTHRCIAPDLIGMGKSDKPDLGYFFDDHVRFMDAFIEALGLEEVVLVIHDWGSALGFHWAKRNPERVKGIAFMEFIRPIPTWDEWPEFARETFQAFRTTDVGRKLIIDQNVFIEGTLPMGVVRPLTEVEMDHYREPFLNPVDREPLWRFPNELPIAGEPANIVALVEEYMDWLHQSPVPKLLFWGTPGVLIPPAEAARLARSLPNCKAVDIGPGLNLLQEDNPDLIGSEIARWLSTLEISG

SEQ ID NO: 2595 - protein, 277 aa, Synthetic construct
MFHYVDVGPRDGTPVLFLHGNPTSSYVWRNIIPHVAPTHRCIAPDLIGMGKSDKPDLGYFFDDHVRFMDAFIEALGLEEVVLVIHDWGSALGFHWAKRNPERVKGIAFMEFIRPIPTWDEWPEFARETFQAFRTTDVGRKLIIDQNVFIEGTLPMGVVRPLTEVEMDHYREPFLNPVDREPLWRFPNELPIAGEPANIVALVEEYMDWLHQSPVPKLLFWGTPGVLIPPAEAARLASSLPNCKAVDIGPGLNLLQEDNPDLIGSEIARWLSTLEISG

SEQ ID NO: 2596 - protein, 277 aa, Synthetic construct
MFHYVDVGPRDGTPVLFLHGNPTSSYVWRNIIPHVAPTHRCIAPDLIGMGKSDKPDLGYFFDDHVRFMDAFIEALGLEEVVLVIHDWGSALGFHWAKRNPERVKGIAFMEFIRPIPTWDEWPEFARETFQAFRTTDVGRKLIIDQNVFIEGTLPMGVVRPLTEVEMDHYREPFLNPVDREPLWRFPNELPIAGEPANIVALVEEYMDWLHQSPVPKLLFWGTPGVLIPPAEAARLAKTLPNCKAVDIGPGLNLLQEDNPDLIGSEIARWLSTLEISG

SEQ ID NO: 2597 - protein, 277 aa, Synthetic construct
MFHYVDVGPRDGTPVLFLHGNPTSSYVWRNIIPHVAPTHRCIAPDLIGMGKSDKPDLGYFFDDHVRFMDAFIEALGLEEVVLVIHDWGSALGFHWAKRNPERVKGIAFMEFIRPIPTWDEWPEFARETFQAFRTTDVGRKLIIDQNVFIEGTLPMGVVRPLTEVEMDHYREPFLNPVDREPLWRFPNELPIAGEPANIVALVEEYMDWLHQSPVPKLLFWGTPGVLIPPAEAARLAKDLPNCKAVDIGPGLNLLQEDNPDLIGSEIARWLSTLEISG

SEQ ID NO: 2598 - protein, 277 aa, Synthetic construct
MFHYVDVGPRDGTPVLFLHGNPTSSYVWRNIIPHVAPTHRCIAPDLIGMGKSDKPDLGYFFDDHVRFMDAFIEALGLEEVVLVIHDWGSALGFHWAKRNPERVKGIAFMEFIRPIPTWDEWPEFARETFQAFRTTDVGRKLIIDQNVFIEGTLPMGVVRPLTEVEMDHYREPFLNPVDREPLWRFPNELPIAGEPANIVALVEEYMDWLHQSPVPKLLFWGTPGVLIPPAEAARLAKALPNCKAVDIGPGLNLLQEDNPDLIGSEIARWLSTLEISG

SEQ ID NO: 2599 - protein, 277 aa, Synthetic construct
MFHYVDVGPRDGTPVLFLHGNPTSSYVWRNIIPHVAPTHRCIAPDLIGMGKSDKPDLGYFFDDHVRFMDAFIEALGLEEVVLVIHDWGSALGFHWAKRNPERVKGIAFMEFIRPIPTWDEWPEFARETFQAFRTTDVGRKLIIDQNVFIEGTLPMGVVRPLTEVEMDHYREPFLNPVDREPLWRFPNELPIAGEPANIVALVEEYMDWLHQSPVPKLLFWGTPGVLIPPAEAARLAKELPNCKAVDIGPGLNLLQEDNPDLIGSEIARWLSTLEISG

SEQ ID NO: 2600 - protein, 277 aa, Synthetic construct
MFHYVDVGPRDGTPVLFLHGNPTSSYVWRNIIPHVAPTHRCIAPDLIGMGKSDKPDLGYFFDDHVRFMDAFIEALGLEEVVLVIHDWGSALGFHWAKRNPERVKGIAFMEFIRPIPTWDEWPEFARETFQAFRTTDVGRKLIIDQNVFIEGTLPMGVVRPLTEVEMDHYREPFLNPVDREPLWRFPNELPIAGEPANIVALVEEYMDWLHQSPVPKLLFWGTPGVLIPPAEAARLAKLLPNCKAVDIGPGLNLLQEDNPDLIGSEIARWLSTLEISG

SEQ ID NO: 2601 - protein, 277 aa, Synthetic construct
MFHYVDVGPRDGTPVLFLHGNPTSSYVWRNIIPHVAPTHRCIAPDLIGMGKSDKPDLGYFFDDHVRFMDAFIEALGLEEVVLVIHDWGSALGFHWAKRNPERVKGIAFMEFIRPIPTWDEWPEFARETFQAFRTTDVGRKLIIDQNVFIEGTLPMGVVRPLTEVEMDHYREPFLNPVDREPLWRFPNELPIAGEPANIVALVEEYMDWLHQSPVPKLLFWGTPGVLIPPAEAARLAKVLPNCKAVDIGPGLNLLQEDNPDLIGSEIARWLSTLEISG

SEQ ID NO: 2602 - protein, 277 aa, Synthetic construct
MFHYVDVGPRDGTPVLFLHGNPTSSYVWRNIIPHVAPTHRCIAPDLIGMGKSDKPDLGYFFDDHVRFMDAFIEALGLEEVVLVIHDWGSALGFHWAKRNPERVKGIAFMEFIRPIPTWDEWPEFARETFQAFRTTDVGRKLIIDQNVFIEGTLPMGVVRPLTEVEMDHYREPFLNPVDREPLWRFPNELPIAGEPANIVALVEEYMDWLHQSPVPKLLFWGTPGVLIPPAEAARLAKSIPNCKAVDIGPGLNLLQEDNPDLIGSEIARWLSTLEISG

SEQ ID NO: 2603 - protein, 277 aa, Synthetic construct
MFHYVDVGPRDGTPVLFLHGNPTSSYVWRNIIPHVAPTHRCIAPDLIGMGKSDKPDLGYFFDDHVRFMDAFIEALGLEEVVLVIHDWGSALGFHWAKRNPERVKGIAFMEFIRPIPTWDEWPEFARETFQAFRTTDVGRKLIIDQNVFIEGTLPMGVVRPLTEVEMDHYREPFLNPVDREPLWRFPNELPIAGEPANIVALVEEYMDWLHQSPVPKLLFWGTPGVLIPPAEAARLAKSFPNCKAVDIGPGLNLLQEDNPDLIGSEIARWLSTLEISG

SEQ ID NO: 2604 - protein, 277 aa, Synthetic construct
MFHYVDVGPRDGTPVLFLHGNPTSSYVWRNIIPHVAPTHRCIAPDLIGMGKSDKPDLGYFFDDHVRFMDAFIEALGLEEVVLVIHDWGSALGFHWAKRNPERVKGIAFMEFIRPIPTWDEWPEFARETFQAFRTTDVGRKLIIDQNVFIEGTLPMGVVRPLTEVEMDHYREPFLNPVDREPLWRFPNELPIAGEPANIVALVEEYMDWLHQSPVPKLLFWGTPGVLIPPAEAARLAKSMPNCKAVDIGPGLNLLQEDNPDLIGSEIARWLSTLEISG

SEQ ID NO: 2605 - protein, 277 aa, Synthetic construct
MFHYVDVGPRDGTPVLFLHGNPTSSYVWRNIIPHVAPTHRCIAPDLIGMGKSDKPDLGYFFDDHVRFMDAFIEALGLEEVVLVIHDWGSALGFHWAKRNPERVKGIAFMEFIRPIPTWDEWPEFARETFQAFRTTDVGRKLIIDQNVFIEGTLPMGVVRPLTEVEMDHYREPFLNPVDREPLWRFPNELPIAGEPANIVALVEEYMDWLHQSPVPKLLFWGTPGVLIPPAEAARLAKSWPNCKAVDIGPGLNLLQEDNPDLIGSEIARWLSTLEISG

SEQ ID NO: 2606 - protein, 277 aa, Synthetic construct
MFHYVDVGPRDGTPVLFLHGNPTSSYVWRNIIPHVAPTHRCIAPDLIGMGKSDKPDLGYFFDDHVRFMDAFIEALGLEEVVLVIHDWGSALGFHWAKRNPERVKGIAFMEFIRPIPTWDEWPEFARETFQAFRTTDVGRKLIIDQNVFIEGTLPMGVVRPLTEVEMDHYREPFLNPVDREPLWRFPNELPIAGEPANIVALVEEYMDWLHQSPVPKLLFWGTPGVLIPPAEAARLAKSVPNCKAVDIGPGLNLLQEDNPDLIGSEIARWLSTLEISG

SEQ ID NO: 2607 - protein, 277 aa, Synthetic construct
MFHYVDVGPRDGTPVLFLHGNPTSSYVWRNIIPHVAPTHRCIAPDLIGMGKSDKPDLGYFFDDHVRFMDAFIEALGLEEVVLVIHDWGSALGFHWAKRNPERVKGIAFMEFIRPIPTWDEWPEFARETFQAFRTTDVGRKLIIDQNVFIEGTLPMGVVRPLTEVEMDHYREPFLNPVDREPLWRFPNELPIAGEPANIVALVEEYMDWLHQSPVPKLLFWGTPGVLIPPAEAARLAKSAPNCKAVDIGPGLNLLQEDNPDLIGSEIARWLSTLEISG

SEQ ID NO: 2608 - protein, 277 aa, Synthetic construct
MFHYVDVGPRDGTPVLFLHGNPTSSYVWRNIIPHVAPTHRCIAPDLIGMGKSDKPDLGYFFDDHVRFMDAFIEALGLEEVVLVIHDWGSALGFHWAKRNPERVKGIAFMEFIRPIPTWDEWPEFARETFQAFRTTDVGRKLIIDQNVFIEGTLPMGVVRPLTEVEMDHYREPFLNPVDREPLWRFPNELPIAGEPANIVALVEEYMDWLHQSPVPKLLFWGTPGVLIPPAEAARLAKSLTNCKAVDIGPGLNLLQEDNPDLIGSEIARWLSTLEISG

SEQ ID NO: 2609 - protein, 277 aa, Synthetic construct
MFHYVDVGPRDGTPVLFLHGNPTSSYVWRNIIPHVAPTHRCIAPDLIGMGKSDKPDLGYFFDDHVRFMDAFIEALGLEEVVLVIHDWGSALGFHWAKRNPERVKGIAFMEFIRPIPTWDEWPEFARETFQAFRTTDVGRKLIIDQNVFIEGTLPMGVVRPLTEVEMDHYREPFLNPVDREPLWRFPNELPIAGEPANIVALVEEYMDWLHQSPVPKLLFWGTPGVLIPPAEAARLAKSLANCKAVDIGPGLNLLQEDNPDLIGSEIARWLSTLEISG

SEQ ID NO: 2610 - protein, 277 aa, Synthetic construct
MFHYVDVGPRDGTPVLFLHGNPTSSYVWRNIIPHVAPTHRCIAPDLIGMGKSDKPDLGYFFDDHVRFMDAFIEALGLEEVVLVIHDWGSALGFHWAKRNPERVKGIAFMEFIRPIPTWDEWPEFARETFQAFRTTDVGRKLIIDQNVFIEGTLPMGVVRPLTEVEMDHYREPFLNPVDREPLWRFPNELPIAGEPANIVALVEEYMDWLHQSPVPKLLFWGTPGVLIPPAEAARLAKSLSNCKAVDIGPGLNLLQEDNPDLIGSEIARWLSTLEISG

SEQ ID NO: 2611 - protein, 277 aa, Synthetic construct
MFHYVDVGPRDGTPVLFLHGNPTSSYVWRNIIPHVAPTHRCIAPDLIGMGKSDKPDLGYFFDDHVRFMDAFIEALGLEEVVLVIHDWGSALGFHWAKRNPERVKGIAFMEFIRPIPTWDEWPEFARETFQAFRTTDVGRKLIIDQNVFIEGTLPMGVVRPLTEVEMDHYREPFLNPVDREPLWRFPNELPIAGEPANIVALVEEYMDWLHQSPVPKLLFWGTPGVLIPPAEAARLAKSLKNCKAVDIGPGLNLLQEDNPDLIGSEIARWLSTLEISG

SEQ ID NO: 2612 - protein, 277 aa, Synthetic construct
MFHYVDVGPRDGTPVLFLHGNPTSSYVWRNIIPHVAPTHRCIAPDLIGMGKSDKPDLGYFFDDHVRFMDAFIEALGLEEVVLVIHDWGSALGFHWAKRNPERVKGIAFMEFIRPIPTWDEWPEFARETFQAFRTTDVGRKLIIDQNVFIEGTLPMGVVRPLTEVEMDHYREPFLNPVDREPLWRFPNELPIAGEPANIVALVEEYMDWLHQSPVPKLLFWGTPGVLIPPAEAARLAKSLENCKAVDIGPGLNLLQEDNPDLIGSEIARWLSTLEISG

SEQ ID NO: 2613 - protein, 277 aa, Synthetic construct
MFHYVDVGPRDGTPVLFLHGNPTSSYVWRNIIPHVAPTHRCIAPDLIGMGKSDKPDLGYFFDDHVRFMDAFIEALGLEEVVLVIHDWGSALGFHWAKRNPERVKGIAFMEFIRPIPTWDEWPEFARETFQAFRTTDVGRKLIIDQNVFIEGTLPMGVVRPLTEVEMDHYREPFLNPVDREPLWRFPNELPIAGEPANIVALVEEYMDWLHQSPVPKLLFWGTPGVLIPPAEAARLAKSLDNCKAVDIGPGLNLLQEDNPDLIGSEIARWLSTLEISG

SEQ ID NO: 2614 - protein, 277 aa, Synthetic construct
MFHYVDVGPRDGTPVLFLHGNPTSSYVWRNIIPHVAPTHRCIAPDLIGMGKSDKPDLGYFFDDHVRFMDAFIEALGLEEVVLVIHDWGSALGFHWAKRNPERVKGIAFMEFIRPIPTWDEWPEFARETFQAFRTTDVGRKLIIDQNVFIEGTLPMGVVRPLTEVEMDHYREPFLNPVDREPLWRFPNELPIAGEPANIVALVEEYMDWLHQSPVPKLLFWGTPGVLIPPAEAARLAKSLPDCKAVDIGPGLNLLQEDNPDLIGSEIARWLSTLEISG

SEQ ID NO: 2615 - protein, 277 aa, Synthetic construct
MFHYVDVGPRDGTPVLFLHGNPTSSYVWRNIIPHVAPTHRCIAPDLIGMGKSDKPDLGYFFDDHVRFMDAFIEALGLEEVVLVIHDWGSALGFHWAKRNPERVKGIAFMEFIRPIPTWDEWPEFARETFQAFRTTDVGRKLIIDQNVFIEGTLPMGVVRPLTEVEMDHYREPFLNPVDREPLWRFPNELPIAGEPANIVALVEEYMDWLHQSPVPKLLFWGTPGVLIPPAEAARLAKSLPHCKAVDIGPGLNLLQEDNPDLIGSEIARWLSTLEISG

SEQ ID NO: 2616 - protein, 277 aa, Synthetic construct
MFHYVDVGPRDGTPVLFLHGNPTSSYVWRNIIPHVAPTHRCIAPDLIGMGKSDKPDLGYFFDDHVRFMDAFIEALGLEEVVLVIHDWGSALGFHWAKRNPERVKGIAFMEFIRPIPTWDEWPEFARETFQAFRTTDVGRKLIIDQNVFIEGTLPMGVVRPLTEVEMDHYREPFLNPVDREPLWRFPNELPIAGEPANIVALVEEYMDWLHQSPVPKLLFWGTPGVLIPPAEAARLAKSLPGCKAVDIGPGLNLLQEDNPDLIGSEIARWLSTLEISG

SEQ ID NO: 2617 - protein, 277 aa, Synthetic construct
MFHYVDVGPRDGTPVLFLHGNPTSSYVWRNIIPHVAPTHRCIAPDLIGMGKSDKPDLGYFFDDHVRFMDAFIEALGLEEVVLVIHDWGSALGFHWAKRNPERVKGIAFMEFIRPIPTWDEWPEFARETFQAFRTTDVGRKLIIDQNVFIEGTLPMGVVRPLTEVEMDHYREPFLNPVDREPLWRFPNELPIAGEPANIVALVEEYMDWLHQSPVPKLLFWGTPGVLIPPAEAARLAKSLPACKAVDIGPGLNLLQEDNPDLIGSEIARWLSTLEISG

SEQ ID NO: 2618 - protein, 277 aa, Synthetic construct
MFHYVDVGPRDGTPVLFLHGNPTSSYVWRNIIPHVAPTHRCIAPDLIGMGKSDKPDLGYFFDDHVRFMDAFIEALGLEEVVLVIHDWGSALGFHWAKRNPERVKGIAFMEFIRPIPTWDEWPEFARETFQAFRTTDVGRKLIIDQNVFIEGTLPMGVVRPLTEVEMDHYREPFLNPVDREPLWRFPNELPIAGEPANIVALVEEYMDWLHQSPVPKLLFWGTPGVLIPPAEAARLAKSLPQCKAVDIGPGLNLLQEDNPDLIGSEIARWLSTLEISG

SEQ ID NO: 2619 - protein, 277 aa, Synthetic construct
MFHYVDVGPRDGTPVLFLHGNPTSSYVWRNIIPHVAPTHRCIAPDLIGMGKSDKPDLGYFFDDHVRFMDAFIEALGLEEVVLVIHDWGSALGFHWAKRNPERVKGIAFMEFIRPIPTWDEWPEFARETFQAFRTTDVGRKLIIDQNVFIEGTLPMGVVRPLTEVEMDHYREPFLNPVDREPLWRFPNELPIAGEPANIVALVEEYMDWLHQSPVPKLLFWGTPGVLIPPAEAARLAKSLPSCKAVDIGPGLNLLQEDNPDLIGSEIARWLSTLEISG

SEQ ID NO: 2620 - protein, 277 aa, Synthetic construct
MFHYVDVGPRDGTPVLFLHGNPTSSYVWRNIIPHVAPTHRCIAPDLIGMGKSDKPDLGYFFDDHVRFMDAFIEALGLEEVVLVIHDWGSALGFHWAKRNPERVKGIAFMEFIRPIPTWDEWPEFARETFQAFRTTDVGRKLIIDQNVFIEGTLPMGVVRPLTEVEMDHYREPFLNPVDREPLWRFPNELPIAGEPANIVALVEEYMDWLHQSPVPKLLFWGTPGVLIPPAEAARLAKSLPNLKAVDIGPGLNLLQEDNPDLIGSEIARWLSTLEISG

SEQ ID NO: 2621 - protein, 277 aa, Synthetic construct
MFHYVDVGPRDGTPVLFLHGNPTSSYVWRNIIPHVAPTHRCIAPDLIGMGKSDKPDLGYFFDDHVRFMDAFIEALGLEEVVLVIHDWGSALGFHWAKRNPERVKGIAFMEFIRPIPTWDEWPEFARETFQAFRTTDVGRKLIIDQNVFIEGTLPMGVVRPLTEVEMDHYREPFLNPVDREPLWRFPNELPIAGEPANIVALVEEYMDWLHQSPVPKLLFWGTPGVLIPPAEAARLAKSLPNVKAVDIGPGLNLLQEDNPDLIGSEIARWLSTLEISG

SEQ ID NO: 2622 - protein, 277 aa, Synthetic construct
MFHYVDVGPRDGTPVLFLHGNPTSSYVWRNIIPHVAPTHRCIAPDLIGMGKSDKPDLGYFFDDHVRFMDAFIEALGLEEVVLVIHDWGSALGFHWAKRNPERVKGIAFMEFIRPIPTWDEWPEFARETFQAFRTTDVGRKLIIDQNVFIEGTLPMGVVRPLTEVEMDHYREPFLNPVDREPLWRFPNELPIAGEPANIVALVEEYMDWLHQSPVPKLLFWGTPGVLIPPAEAARLAKSLPNAKAVDIGPGLNLLQEDNPDLIGSEIARWLSTLEISG

SEQ ID NO: 2623 - protein, 277 aa, Synthetic construct
MFHYVDVGPRDGTPVLFLHGNPTSSYVWRNIIPHVAPTHRCIAPDLIGMGKSDKPDLGYFFDDHVRFMDAFIEALGLEEVVLVIHDWGSALGFHWAKRNPERVKGIAFMEFIRPIPTWDEWPEFARETFQAFRTTDVGRKLIIDQNVFIEGTLPMGVVRPLTEVEMDHYREPFLNPVDREPLWRFPNELPIAGEPANIVALVEEYMDWLHQSPVPKLLFWGTPGVLIPPAEAARLAKSLPNIKAVDIGPGLNLLQEDNPDLIGSEIARWLSTLEISG

SEQ ID NO: 2624 - protein, 277 aa, Synthetic construct
MFHYVDVGPRDGTPVLFLHGNPTSSYVWRNIIPHVAPTHRCIAPDLIGMGKSDKPDLGYFFDDHVRFMDAFIEALGLEEVVLVIHDWGSALGFHWAKRNPERVKGIAFMEFIRPIPTWDEWPEFARETFQAFRTTDVGRKLIIDQNVFIEGTLPMGVVRPLTEVEMDHYREPFLNPVDREPLWRFPNELPIAGEPANIVALVEEYMDWLHQSPVPKLLFWGTPGVLIPPAEAARLAKSLPNMKAVDIGPGLNLLQEDNPDLIGSEIARWLSTLEISG

SEQ ID NO: 2625 - protein, 277 aa, Synthetic construct
MFHYVDVGPRDGTPVLFLHGNPTSSYVWRNIIPHVAPTHRCIAPDLIGMGKSDKPDLGYFFDDHVRFMDAFIEALGLEEVVLVIHDWGSALGFHWAKRNPERVKGIAFMEFIRPIPTWDEWPEFARETFQAFRTTDVGRKLIIDQNVFIEGTLPMGVVRPLTEVEMDHYREPFLNPVDREPLWRFPNELPIAGEPANIVALVEEYMDWLHQSPVPKLLFWGTPGVLIPPAEAARLAKSLPNQKAVDIGPGLNLLQEDNPDLIGSEIARWLSTLEISG

SEQ ID NO: 2626 - protein, 277 aa, Synthetic construct
MFHYVDVGPRDGTPVLFLHGNPTSSYVWRNIIPHVAPTHRCIAPDLIGMGKSDKPDLGYFFDDHVRFMDAFIEALGLEEVVLVIHDWGSALGFHWAKRNPERVKGIAFMEFIRPIPTWDEWPEFARETFQAFRTTDVGRKLIIDQNVFIEGTLPMGVVRPLTEVEMDHYREPFLNPVDREPLWRFPNELPIAGEPANIVALVEEYMDWLHQSPVPKLLFWGTPGVLIPPAEAARLAKSLPNCTAVDIGPGLNLLQEDNPDLIGSEIARWLSTLEISG

SEQ ID NO: 2627 - protein, 277 aa, Synthetic construct
MFHYVDVGPRDGTPVLFLHGNPTSSYVWRNIIPHVAPTHRCIAPDLIGMGKSDKPDLGYFFDDHVRFMDAFIEALGLEEVVLVIHDWGSALGFHWAKRNPERVKGIAFMEFIRPIPTWDEWPEFARETFQAFRTTDVGRKLIIDQNVFIEGTLPMGVVRPLTEVEMDHYREPFLNPVDREPLWRFPNELPIAGEPANIVALVEEYMDWLHQSPVPKLLFWGTPGVLIPPAEAARLAKSLPNCEAVDIGPGLNLLQEDNPDLIGSEIARWLSTLEISG

SEQ ID NO: 2628 - protein, 277 aa, Synthetic construct
MFHYVDVGPRDGTPVLFLHGNPTSSYVWRNIIPHVAPTHRCIAPDLIGMGKSDKPDLGYFFDDHVRFMDAFIEALGLEEVVLVIHDWGSALGFHWAKRNPERVKGIAFMEFIRPIPTWDEWPEFARETFQAFRTTDVGRKLIIDQNVFIEGTLPMGVVRPLTEVEMDHYREPFLNPVDREPLWRFPNELPIAGEPANIVALVEEYMDWLHQSPVPKLLFWGTPGVLIPPAEAARLAKSLPNCRAVDIGPGLNLLQEDNPDLIGSEIARWLSTLEISG

SEQ ID NO: 2629 - protein, 277 aa, Synthetic construct
MFHYVDVGPRDGTPVLFLHGNPTSSYVWRNIIPHVAPTHRCIAPDLIGMGKSDKPDLGYFFDDHVRFMDAFIEALGLEEVVLVIHDWGSALGFHWAKRNPERVKGIAFMEFIRPIPTWDEWPEFARETFQAFRTTDVGRKLIIDQNVFIEGTLPMGVVRPLTEVEMDHYREPFLNPVDREPLWRFPNELPIAGEPANIVALVEEYMDWLHQSPVPKLLFWGTPGVLIPPAEAARLAKSLPNCQAVDIGPGLNLLQEDNPDLIGSEIARWLSTLEISG

SEQ ID NO: 2630 - protein, 277 aa, Synthetic construct
MFHYVDVGPRDGTPVLFLHGNPTSSYVWRNIIPHVAPTHRCIAPDLIGMGKSDKPDLGYFFDDHVRFMDAFIEALGLEEVVLVIHDWGSALGFHWAKRNPERVKGIAFMEFIRPIPTWDEWPEFARETFQAFRTTDVGRKLIIDQNVFIEGTLPMGVVRPLTEVEMDHYREPFLNPVDREPLWRFPNELPIAGEPANIVALVEEYMDWLHQSPVPKLLFWGTPGVLIPPAEAARLAKSLPNCSAVDIGPGLNLLQEDNPDLIGSEIARWLSTLEISG

SEQ ID NO: 2631 - protein, 277 aa, Synthetic construct
MFHYVDVGPRDGTPVLFLHGNPTSSYVWRNIIPHVAPTHRCIAPDLIGMGKSDKPDLGYFFDDHVRFMDAFIEALGLEEVVLVIHDWGSALGFHWAKRNPERVKGIAFMEFIRPIPTWDEWPEFARETFQAFRTTDVGRKLIIDQNVFIEGTLPMGVVRPLTEVEMDHYREPFLNPVDREPLWRFPNELPIAGEPANIVALVEEYMDWLHQSPVPKLLFWGTPGVLIPPAEAARLAKSLPNCVAVDIGPGLNLLQEDNPDLIGSEIARWLSTLEISG

SEQ ID NO: 2632 - protein, 277 aa, Synthetic construct
MFHYVDVGPRDGTPVLFLHGNPTSSYVWRNIIPHVAPTHRCIAPDLIGMGKSDKPDLGYFFDDHVRFMDAFIEALGLEEVVLVIHDWGSALGFHWAKRNPERVKGIAFMEFIRPIPTWDEWPEFARETFQAFRTTDVGRKLIIDQNVFIEGTLPMGVVRPLTEVEMDHYREPFLNPVDREPLWRFPNELPIAGEPANIVALVEEYMDWLHQSPVPKLLFWGTPGVLIPPAEAARLAKSLPNCKVVDIGPGLNLLQEDNPDLIGSEIARWLSTLEISG

SEQ ID NO: 2633 - protein, 277 aa, Synthetic construct
MFHYVDVGPRDGTPVLFLHGNPTSSYVWRNIIPHVAPTHRCIAPDLIGMGKSDKPDLGYFFDDHVRFMDAFIEALGLEEVVLVIHDWGSALGFHWAKRNPERVKGIAFMEFIRPIPTWDEWPEFARETFQAFRTTDVGRKLIIDQNVFIEGTLPMGVVRPLTEVEMDHYREPFLNPVDREPLWRFPNELPIAGEPANIVALVEEYMDWLHQSPVPKLLFWGTPGVLIPPAEAARLAKSLPNCKIVDIGPGLNLLQEDNPDLIGSEIARWLSTLEISG

SEQ ID NO: 2634 - protein, 277 aa, Synthetic construct
MFHYVDVGPRDGTPVLFLHGNPTSSYVWRNIIPHVAPTHRCIAPDLIGMGKSDKPDLGYFFDDHVRFMDAFIEALGLEEVVLVIHDWGSALGFHWAKRNPERVKGIAFMEFIRPIPTWDEWPEFARETFQAFRTTDVGRKLIIDQNVFIEGTLPMGVVRPLTEVEMDHYREPFLNPVDREPLWRFPNELPIAGEPANIVALVEEYMDWLHQSPVPKLLFWGTPGVLIPPAEAARLAKSLPNCKLVDIGPGLNLLQEDNPDLIGSEIARWLSTLEISG

SEQ ID NO: 2635 - protein, 277 aa, Synthetic construct
MFHYVDVGPRDGTPVLFLHGNPTSSYVWRNIIPHVAPTHRCIAPDLIGMGKSDKPDLGYFFDDHVRFMDAFIEALGLEEVVLVIHDWGSALGFHWAKRNPERVKGIAFMEFIRPIPTWDEWPEFARETFQAFRTTDVGRKLIIDQNVFIEGTLPMGVVRPLTEVEMDHYREPFLNPVDREPLWRFPNELPIAGEPANIVALVEEYMDWLHQSPVPKLLFWGTPGVLIPPAEAARLAKSLPNCKTVDIGPGLNLLQEDNPDLIGSEIARWLSTLEISG

SEQ ID NO: 2636 - protein, 277 aa, Synthetic construct
MFHYVDVGPRDGTPVLFLHGNPTSSYVWRNIIPHVAPTHRCIAPDLIGMGKSDKPDLGYFFDDHVRFMDAFIEALGLEEVVLVIHDWGSALGFHWAKRNPERVKGIAFMEFIRPIPTWDEWPEFARETFQAFRTTDVGRKLIIDQNVFIEGTLPMGVVRPLTEVEMDHYREPFLNPVDREPLWRFPNELPIAGEPANIVALVEEYMDWLHQSPVPKLLFWGTPGVLIPPAEAARLAKSLPNCKRVDIGPGLNLLQEDNPDLIGSEIARWLSTLEISG

SEQ ID NO: 2637 - protein, 277 aa, Synthetic construct
MFHYVDVGPRDGTPVLFLHGNPTSSYVWRNIIPHVAPTHRCIAPDLIGMGKSDKPDLGYFFDDHVRFMDAFIEALGLEEVVLVIHDWGSALGFHWAKRNPERVKGIAFMEFIRPIPTWDEWPEFARETFQAFRTTDVGRKLIIDQNVFIEGTLPMGVVRPLTEVEMDHYREPFLNPVDREPLWRFPNELPIAGEPANIVALVEEYMDWLHQSPVPKLLFWGTPGVLIPPAEAARLAKSLPNCKSVDIGPGLNLLQEDNPDLIGSEIARWLSTLEISG

SEQ ID NO: 2638 - protein, 277 aa, Synthetic construct
MFHYVDVGPRDGTPVLFLHGNPTSSYVWRNIIPHVAPTHRCIAPDLIGMGKSDKPDLGYFFDDHVRFMDAFIEALGLEEVVLVIHDWGSALGFHWAKRNPERVKGIAFMEFIRPIPTWDEWPEFARETFQAFRTTDVGRKLIIDQNVFIEGTLPMGVVRPLTEVEMDHYREPFLNPVDREPLWRFPNELPIAGEPANIVALVEEYMDWLHQSPVPKLLFWGTPGVLIPPAEAARLAKSLPNCKAIDIGPGLNLLQEDNPDLIGSEIARWLSTLEISG

SEQ ID NO: 2639 - protein, 277 aa, Synthetic construct
MFHYVDVGPRDGTPVLFLHGNPTSSYVWRNIIPHVAPTHRCIAPDLIGMGKSDKPDLGYFFDDHVRFMDAFIEALGLEEVVLVIHDWGSALGFHWAKRNPERVKGIAFMEFIRPIPTWDEWPEFARETFQAFRTTDVGRKLIIDQNVFIEGTLPMGVVRPLTEVEMDHYREPFLNPVDREPLWRFPNELPIAGEPANIVALVEEYMDWLHQSPVPKLLFWGTPGVLIPPAEAARLAKSLPNCKATDIGPGLNLLQEDNPDLIGSEIARWLSTLEISG

SEQ ID NO: 2640 - protein, 277 aa, Synthetic construct
MFHYVDVGPRDGTPVLFLHGNPTSSYVWRNIIPHVAPTHRCIAPDLIGMGKSDKPDLGYFFDDHVRFMDAFIEALGLEEVVLVIHDWGSALGFHWAKRNPERVKGIAFMEFIRPIPTWDEWPEFARETFQAFRTTDVGRKLIIDQNVFIEGTLPMGVVRPLTEVEMDHYREPFLNPVDREPLWRFPNELPIAGEPANIVALVEEYMDWLHQSPVPKLLFWGTPGVLIPPAEAARLAKSLPNCKAADIGPGLNLLQEDNPDLIGSEIARWLSTLEISG

SEQ ID NO: 2641 - protein, 277 aa, Synthetic construct
MFHYVDVGPRDGTPVLFLHGNPTSSYVWRNIIPHVAPTHRCIAPDLIGMGKSDKPDLGYFFDDHVRFMDAFIEALGLEEVVLVIHDWGSALGFHWAKRNPERVKGIAFMEFIRPIPTWDEWPEFARETFQAFRTTDVGRKLIIDQNVFIEGTLPMGVVRPLTEVEMDHYREPFLNPVDREPLWRFPNELPIAGEPANIVALVEEYMDWLHQSPVPKLLFWGTPGVLIPPAEAARLAKSLPNCKARDIGPGLNLLQEDNPDLIGSEIARWLSTLEISG

SEQ ID NO: 2642 - protein, 277 aa, Synthetic construct
MFHYVDVGPRDGTPVLFLHGNPTSSYVWRNIIPHVAPTHRCIAPDLIGMGKSDKPDLGYFFDDHVRFMDAFIEALGLEEVVLVIHDWGSALGFHWAKRNPERVKGIAFMEFIRPIPTWDEWPEFARETFQAFRTTDVGRKLIIDQNVFIEGTLPMGVVRPLTEVEMDHYREPFLNPVDREPLWRFPNELPIAGEPANIVALVEEYMDWLHQSPVPKLLFWGTPGVLIPPAEAARLAKSLPNCKALDIGPGLNLLQEDNPDLIGSEIARWLSTLEISG

SEQ ID NO: 2643 - protein, 277 aa, Synthetic construct
MFHYVDVGPRDGTPVLFLHGNPTSSYVWRNIIPHVAPTHRCIAPDLIGMGKSDKPDLGYFFDDHVRFMDAFIEALGLEEVVLVIHDWGSALGFHWAKRNPERVKGIAFMEFIRPIPTWDEWPEFARETFQAFRTTDVGRKLIIDQNVFIEGTLPMGVVRPLTEVEMDHYREPFLNPVDREPLWRFPNELPIAGEPANIVALVEEYMDWLHQSPVPKLLFWGTPGVLIPPAEAARLAKSLPNCKASDIGPGLNLLQEDNPDLIGSEIARWLSTLEISG

SEQ ID NO: 2644 - protein, 277 aa, Synthetic construct
MFHYVDVGPRDGTPVLFLHGNPTSSYVWRNIIPHVAPTHRCIAPDLIGMGKSDKPDLGYFFDDHVRFMDAFIEALGLEEVVLVIHDWGSALGFHWAKRNPERVKGIAFMEFIRPIPTWDEWPEFARETFQAFRTTDVGRKLIIDQNVFIEGTLPMGVVRPLTEVEMDHYREPFLNPVDREPLWRFPNELPIAGEPANIVALVEEYMDWLHQSPVPKLLFWGTPGVLIPPAEAARLAKSLPNCKAVEIGPGLNLLQEDNPDLIGSEIARWLSTLEISG

SEQ ID NO: 2645 - protein, 277 aa, Synthetic construct
MFHYVDVGPRDGTPVLFLHGNPTSSYVWRNIIPHVAPTHRCIAPDLIGMGKSDKPDLGYFFDDHVRFMDAFIEALGLEEVVLVIHDWGSALGFHWAKRNPERVKGIAFMEFIRPIPTWDEWPEFARETFQAFRTTDVGRKLIIDQNVFIEGTLPMGVVRPLTEVEMDHYREPFLNPVDREPLWRFPNELPIAGEPANIVALVEEYMDWLHQSPVPKLLFWGTPGVLIPPAEAARLAKSLPNCKAVTIGPGLNLLQEDNPDLIGSEIARWLSTLEISG

SEQ ID NO: 2646 - protein, 277 aa, Synthetic construct
MFHYVDVGPRDGTPVLFLHGNPTSSYVWRNIIPHVAPTHRCIAPDLIGMGKSDKPDLGYFFDDHVRFMDAFIEALGLEEVVLVIHDWGSALGFHWAKRNPERVKGIAFMEFIRPIPTWDEWPEFARETFQAFRTTDVGRKLIIDQNVFIEGTLPMGVVRPLTEVEMDHYREPFLNPVDREPLWRFPNELPIAGEPANIVALVEEYMDWLHQSPVPKLLFWGTPGVLIPPAEAARLAKSLPNCKAVPIGPGLNLLQEDNPDLIGSEIARWLSTLEISG

SEQ ID NO: 2647 - protein, 277 aa, Synthetic construct
MFHYVDVGPRDGTPVLFLHGNPTSSYVWRNIIPHVAPTHRCIAPDLIGMGKSDKPDLGYFFDDHVRFMDAFIEALGLEEVVLVIHDWGSALGFHWAKRNPERVKGIAFMEFIRPIPTWDEWPEFARETFQAFRTTDVGRKLIIDQNVFIEGTLPMGVVRPLTEVEMDHYREPFLNPVDREPLWRFPNELPIAGEPANIVALVEEYMDWLHQSPVPKLLFWGTPGVLIPPAEAARLAKSLPNCKAVQIGPGLNLLQEDNPDLIGSEIARWLSTLEISG

SEQ ID NO: 2648 - protein, 277 aa, Synthetic construct
MFHYVDVGPRDGTPVLFLHGNPTSSYVWRNIIPHVAPTHRCIAPDLIGMGKSDKPDLGYFFDDHVRFMDAFIEALGLEEVVLVIHDWGSALGFHWAKRNPERVKGIAFMEFIRPIPTWDEWPEFARETFQAFRTTDVGRKLIIDQNVFIEGTLPMGVVRPLTEVEMDHYREPFLNPVDREPLWRFPNELPIAGEPANIVALVEEYMDWLHQSPVPKLLFWGTPGVLIPPAEAARLAKSLPNCKAVAIGPGLNLLQEDNPDLIGSEIARWLSTLEISG

SEQ ID NO: 2649 - protein, 277 aa, Synthetic construct
MFHYVDVGPRDGTPVLFLHGNPTSSYVWRNIIPHVAPTHRCIAPDLIGMGKSDKPDLGYFFDDHVRFMDAFIEALGLEEVVLVIHDWGSALGFHWAKRNPERVKGIAFMEFIRPIPTWDEWPEFARETFQAFRTTDVGRKLIIDQNVFIEGTLPMGVVRPLTEVEMDHYREPFLNPVDREPLWRFPNELPIAGEPANIVALVEEYMDWLHQSPVPKLLFWGTPGVLIPPAEAARLAKSLPNCKAVSIGPGLNLLQEDNPDLIGSEIARWLSTLEISG

SEQ ID NO: 2650 - protein, 277 aa, Synthetic construct
MFHYVDVGPRDGTPVLFLHGNPTSSYVWRNIIPHVAPTHRCIAPDLIGMGKSDKPDLGYFFDDHVRFMDAFIEALGLEEVVLVIHDWGSALGFHWAKRNPERVKGIAFMEFIRPIPTWDEWPEFARETFQAFRTTDVGRKLIIDQNVFIEGTLPMGVVRPLTEVEMDHYREPFLNPVDREPLWRFPNELPIAGEPANIVALVEEYMDWLHQSPVPKLLFWGTPGVLIPPAEAARLAKSLPNCKAVDVGPGLNLLQEDNPDLIGSEIARWLSTLEISG

SEQ ID NO: 2651 - protein, 277 aa, Synthetic construct
MFHYVDVGPRDGTPVLFLHGNPTSSYVWRNIIPHVAPTHRCIAPDLIGMGKSDKPDLGYFFDDHVRFMDAFIEALGLEEVVLVIHDWGSALGFHWAKRNPERVKGIAFMEFIRPIPTWDEWPEFARETFQAFRTTDVGRKLIIDQNVFIEGTLPMGVVRPLTEVEMDHYREPFLNPVDREPLWRFPNELPIAGEPANIVALVEEYMDWLHQSPVPKLLFWGTPGVLIPPAEAARLAKSLPNCKAVDLGPGLNLLQEDNPDLIGSEIARWLSTLEISG

SEQ ID NO: 2652 - protein, 277 aa, Synthetic construct
MFHYVDVGPRDGTPVLFLHGNPTSSYVWRNIIPHVAPTHRCIAPDLIGMGKSDKPDLGYFFDDHVRFMDAFIEALGLEEVVLVIHDWGSALGFHWAKRNPERVKGIAFMEFIRPIPTWDEWPEFARETFQAFRTTDVGRKLIIDQNVFIEGTLPMGVVRPLTEVEMDHYREPFLNPVDREPLWRFPNELPIAGEPANIVALVEEYMDWLHQSPVPKLLFWGTPGVLIPPAEAARLAKSLPNCKAVDAGPGLNLLQEDNPDLIGSEIARWLSTLEISG

SEQ ID NO: 2653 - protein, 277 aa, Synthetic construct
MFHYVDVGPRDGTPVLFLHGNPTSSYVWRNIIPHVAPTHRCIAPDLIGMGKSDKPDLGYFFDDHVRFMDAFIEALGLEEVVLVIHDWGSALGFHWAKRNPERVKGIAFMEFIRPIPTWDEWPEFARETFQAFRTTDVGRKLIIDQNVFIEGTLPMGVVRPLTEVEMDHYREPFLNPVDREPLWRFPNELPIAGEPANIVALVEEYMDWLHQSPVPKLLFWGTPGVLIPPAEAARLAKSLPNCKAVDCGPGLNLLQEDNPDLIGSEIARWLSTLEISG

SEQ ID NO: 2654 - protein, 277 aa, Synthetic construct
MFHYVDVGPRDGTPVLFLHGNPTSSYVWRNIIPHVAPTHRCIAPDLIGMGKSDKPDLGYFFDDHVRFMDAFIEALGLEEVVLVIHDWGSALGFHWAKRNPERVKGIAFMEFIRPIPTWDEWPEFARETFQAFRTTDVGRKLIIDQNVFIEGTLPMGVVRPLTEVEMDHYREPFLNPVDREPLWRFPNELPIAGEPANIVALVEEYMDWLHQSPVPKLLFWGTPGVLIPPAEAARLAKSLPNCKAVDFGPGLNLLQEDNPDLIGSEIARWLSTLEISG

SEQ ID NO: 2655 - protein, 277 aa, Synthetic construct
MFHYVDVGPRDGTPVLFLHGNPTSSYVWRNIIPHVAPTHRCIAPDLIGMGKSDKPDLGYFFDDHVRFMDAFIEALGLEEVVLVIHDWGSALGFHWAKRNPERVKGIAFMEFIRPIPTWDEWPEFARETFQAFRTTDVGRKLIIDQNVFIEGTLPMGVVRPLTEVEMDHYREPFLNPVDREPLWRFPNELPIAGEPANIVALVEEYMDWLHQSPVPKLLFWGTPGVLIPPAEAARLAKSLPNCKAVDTGPGLNLLQEDNPDLIGSEIARWLSTLEISG

SEQ ID NO: 2656 - protein, 277 aa, Synthetic construct
MFHYVDVGPRDGTPVLFLHGNPTSSYVWRNIIPHVAPTHRCIAPDLIGMGKSDKPDLGYFFDDHVRFMDAFIEALGLEEVVLVIHDWGSALGFHWAKRNPERVKGIAFMEFIRPIPTWDEWPEFARETFQAFRTTDVGRKLIIDQNVFIEGTLPMGVVRPLTEVEMDHYREPFLNPVDREPLWRFPNELPIAGEPANIVALVEEYMDWLHQSPVPKLLFWGTPGVLIPPAEAARLAKSLPNCKAVDIAPGLNLLQEDNPDLIGSEIARWLSTLEISG

SEQ ID NO: 2657 - protein, 277 aa, Synthetic construct
MFHYVDVGPRDGTPVLFLHGNPTSSYVWRNIIPHVAPTHRCIAPDLIGMGKSDKPDLGYFFDDHVRFMDAFIEALGLEEVVLVIHDWGSALGFHWAKRNPERVKGIAFMEFIRPIPTWDEWPEFARETFQAFRTTDVGRKLIIDQNVFIEGTLPMGVVRPLTEVEMDHYREPFLNPVDREPLWRFPNELPIAGEPANIVALVEEYMDWLHQSPVPKLLFWGTPGVLIPPAEAARLAKSLPNCKAVDIEPGLNLLQEDNPDLIGSEIARWLSTLEISG

SEQ ID NO: 2658 - protein, 277 aa, Synthetic construct
MFHYVDVGPRDGTPVLFLHGNPTSSYVWRNIIPHVAPTHRCIAPDLIGMGKSDKPDLGYFFDDHVRFMDAFIEALGLEEVVLVIHDWGSALGFHWAKRNPERVKGIAFMEFIRPIPTWDEWPEFARETFQAFRTTDVGRKLIIDQNVFIEGTLPMGVVRPLTEVEMDHYREPFLNPVDREPLWRFPNELPIAGEPANIVALVEEYMDWLHQSPVPKLLFWGTPGVLIPPAEAARLAKSLPNCKAVDISPGLNLLQEDNPDLIGSEIARWLSTLEISG

SEQ ID NO: 2659 - protein, 277 aa, Synthetic construct
MFHYVDVGPRDGTPVLFLHGNPTSSYVWRNIIPHVAPTHRCIAPDLIGMGKSDKPDLGYFFDDHVRFMDAFIEALGLEEVVLVIHDWGSALGFHWAKRNPERVKGIAFMEFIRPIPTWDEWPEFARETFQAFRTTDVGRKLIIDQNVFIEGTLPMGVVRPLTEVEMDHYREPFLNPVDREPLWRFPNELPIAGEPANIVALVEEYMDWLHQSPVPKLLFWGTPGVLIPPAEAARLAKSLPNCKAVDIPPGLNLLQEDNPDLIGSEIARWLSTLEISG

SEQ ID NO: 2660 - protein, 277 aa, Synthetic construct
MFHYVDVGPRDGTPVLFLHGNPTSSYVWRNIIPHVAPTHRCIAPDLIGMGKSDKPDLGYFFDDHVRFMDAFIEALGLEEVVLVIHDWGSALGFHWAKRNPERVKGIAFMEFIRPIPTWDEWPEFARETFQAFRTTDVGRKLIIDQNVFIEGTLPMGVVRPLTEVEMDHYREPFLNPVDREPLWRFPNELPIAGEPANIVALVEEYMDWLHQSPVPKLLFWGTPGVLIPPAEAARLAKSLPNCKAVDIDPGLNLLQEDNPDLIGSEIARWLSTLEISG

SEQ ID NO: 2661 - protein, 277 aa, Synthetic construct
MFHYVDVGPRDGTPVLFLHGNPTSSYVWRNIIPHVAPTHRCIAPDLIGMGKSDKPDLGYFFDDHVRFMDAFIEALGLEEVVLVIHDWGSALGFHWAKRNPERVKGIAFMEFIRPIPTWDEWPEFARETFQAFRTTDVGRKLIIDQNVFIEGTLPMGVVRPLTEVEMDHYREPFLNPVDREPLWRFPNELPIAGEPANIVALVEEYMDWLHQSPVPKLLFWGTPGVLIPPAEAARLAKSLPNCKAVDITPGLNLLQEDNPDLIGSEIARWLSTLEISG

SEQ ID NO: 2662 - protein, 277 aa, Synthetic construct
MFHYVDVGPRDGTPVLFLHGNPTSSYVWRNIIPHVAPTHRCIAPDLIGMGKSDKPDLGYFFDDHVRFMDAFIEALGLEEVVLVIHDWGSALGFHWAKRNPERVKGIAFMEFIRPIPTWDEWPEFARETFQAFRTTDVGRKLIIDQNVFIEGTLPMGVVRPLTEVEMDHYREPFLNPVDREPLWRFPNELPIAGEPANIVALVEEYMDWLHQSPVPKLLFWGTPGVLIPPAEAARLAKSLPNCKAVDIGEGLNLLQEDNPDLIGSEIARWLSTLEISG

SEQ ID NO: 2663 - protein, 277 aa, Synthetic construct
MFHYVDVGPRDGTPVLFLHGNPTSSYVWRNIIPHVAPTHRCIAPDLIGMGKSDKPDLGYFFDDHVRFMDAFIEALGLEEVVLVIHDWGSALGFHWAKRNPERVKGIAFMEFIRPIPTWDEWPEFARETFQAFRTTDVGRKLIIDQNVFIEGTLPMGVVRPLTEVEMDHYREPFLNPVDREPLWRFPNELPIAGEPANIVALVEEYMDWLHQSPVPKLLFWGTPGVLIPPAEAARLAKSLPNCKAVDIGAGLNLLQEDNPDLIGSEIARWLSTLEISG

SEQ ID NO: 2664 - protein, 277 aa, Synthetic construct
MFHYVDVGPRDGTPVLFLHGNPTSSYVWRNIIPHVAPTHRCIAPDLIGMGKSDKPDLGYFFDDHVRFMDAFIEALGLEEVVLVIHDWGSALGFHWAKRNPERVKGIAFMEFIRPIPTWDEWPEFARETFQAFRTTDVGRKLIIDQNVFIEGTLPMGVVRPLTEVEMDHYREPFLNPVDREPLWRFPNELPIAGEPANIVALVEEYMDWLHQSPVPKLLFWGTPGVLIPPAEAARLAKSLPNCKAVDIGDGLNLLQEDNPDLIGSEIARWLSTLEISG

SEQ ID NO: 2665 - protein, 277 aa, Synthetic construct
MFHYVDVGPRDGTPVLFLHGNPTSSYVWRNIIPHVAPTHRCIAPDLIGMGKSDKPDLGYFFDDHVRFMDAFIEALGLEEVVLVIHDWGSALGFHWAKRNPERVKGIAFMEFIRPIPTWDEWPEFARETFQAFRTTDVGRKLIIDQNVFIEGTLPMGVVRPLTEVEMDHYREPFLNPVDREPLWRFPNELPIAGEPANIVALVEEYMDWLHQSPVPKLLFWGTPGVLIPPAEAARLAKSLPNCKAVDIGSGLNLLQEDNPDLIGSEIARWLSTLEISG

SEQ ID NO: 2666 - protein, 277 aa, Synthetic construct
MFHYVDVGPRDGTPVLFLHGNPTSSYVWRNIIPHVAPTHRCIAPDLIGMGKSDKPDLGYFFDDHVRFMDAFIEALGLEEVVLVIHDWGSALGFHWAKRNPERVKGIAFMEFIRPIPTWDEWPEFARETFQAFRTTDVGRKLIIDQNVFIEGTLPMGVVRPLTEVEMDHYREPFLNPVDREPLWRFPNELPIAGEPANIVALVEEYMDWLHQSPVPKLLFWGTPGVLIPPAEAARLAKSLPNCKAVDIGKGLNLLQEDNPDLIGSEIARWLSTLEISG

SEQ ID NO: 2667 - protein, 277 aa, Synthetic construct
MFHYVDVGPRDGTPVLFLHGNPTSSYVWRNIIPHVAPTHRCIAPDLIGMGKSDKPDLGYFFDDHVRFMDAFIEALGLEEVVLVIHDWGSALGFHWAKRNPERVKGIAFMEFIRPIPTWDEWPEFARETFQAFRTTDVGRKLIIDQNVFIEGTLPMGVVRPLTEVEMDHYREPFLNPVDREPLWRFPNELPIAGEPANIVALVEEYMDWLHQSPVPKLLFWGTPGVLIPPAEAARLAKSLPNCKAVDIGTGLNLLQEDNPDLIGSEIARWLSTLEISG

SEQ ID NO: 2668 - protein, 277 aa, Synthetic construct
MFHYVDVGPRDGTPVLFLHGNPTSSYVWRNIIPHVAPTHRCIAPDLIGMGKSDKPDLGYFFDDHVRFMDAFIEALGLEEVVLVIHDWGSALGFHWAKRNPERVKGIAFMEFIRPIPTWDEWPEFARETFQAFRTTDVGRKLIIDQNVFIEGTLPMGVVRPLTEVEMDHYREPFLNPVDREPLWRFPNELPIAGEPANIVALVEEYMDWLHQSPVPKLLFWGTPGVLIPPAEAARLAKSLPNCKAVDIGPALNLLQEDNPDLIGSEIARWLSTLEISG

SEQ ID NO: 2669 - protein, 277 aa, Synthetic construct
MFHYVDVGPRDGTPVLFLHGNPTSSYVWRNIIPHVAPTHRCIAPDLIGMGKSDKPDLGYFFDDHVRFMDAFIEALGLEEVVLVIHDWGSALGFHWAKRNPERVKGIAFMEFIRPIPTWDEWPEFARETFQAFRTTDVGRKLIIDQNVFIEGTLPMGVVRPLTEVEMDHYREPFLNPVDREPLWRFPNELPIAGEPANIVALVEEYMDWLHQSPVPKLLFWGTPGVLIPPAEAARLAKSLPNCKAVDIGPSLNLLQEDNPDLIGSEIARWLSTLEISG

SEQ ID NO: 2670 - protein, 277 aa, Synthetic construct
MFHYVDVGPRDGTPVLFLHGNPTSSYVWRNIIPHVAPTHRCIAPDLIGMGKSDKPDLGYFFDDHVRFMDAFIEALGLEEVVLVIHDWGSALGFHWAKRNPERVKGIAFMEFIRPIPTWDEWPEFARETFQAFRTTDVGRKLIIDQNVFIEGTLPMGVVRPLTEVEMDHYREPFLNPVDREPLWRFPNELPIAGEPANIVALVEEYMDWLHQSPVPKLLFWGTPGVLIPPAEAARLAKSLPNCKAVDIGPTLNLLQEDNPDLIGSEIARWLSTLEISG

SEQ ID NO: 2671 - protein, 277 aa, Synthetic construct
MFHYVDVGPRDGTPVLFLHGNPTSSYVWRNIIPHVAPTHRCIAPDLIGMGKSDKPDLGYFFDDHVRFMDAFIEALGLEEVVLVIHDWGSALGFHWAKRNPERVKGIAFMEFIRPIPTWDEWPEFARETFQAFRTTDVGRKLIIDQNVFIEGTLPMGVVRPLTEVEMDHYREPFLNPVDREPLWRFPNELPIAGEPANIVALVEEYMDWLHQSPVPKLLFWGTPGVLIPPAEAARLAKSLPNCKAVDIGPVLNLLQEDNPDLIGSEIARWLSTLEISG

SEQ ID NO: 2672 - protein, 277 aa, Synthetic construct
MFHYVDVGPRDGTPVLFLHGNPTSSYVWRNIIPHVAPTHRCIAPDLIGMGKSDKPDLGYFFDDHVRFMDAFIEALGLEEVVLVIHDWGSALGFHWAKRNPERVKGIAFMEFIRPIPTWDEWPEFARETFQAFRTTDVGRKLIIDQNVFIEGTLPMGVVRPLTEVEMDHYREPFLNPVDREPLWRFPNELPIAGEPANIVALVEEYMDWLHQSPVPKLLFWGTPGVLIPPAEAARLAKSLPNCKAVDIGPCLNLLQEDNPDLIGSEIARWLSTLEISG

SEQ ID NO: 2673 - protein, 277 aa, Synthetic construct
MFHYVDVGPRDGTPVLFLHGNPTSSYVWRNIIPHVAPTHRCIAPDLIGMGKSDKPDLGYFFDDHVRFMDAFIEALGLEEVVLVIHDWGSALGFHWAKRNPERVKGIAFMEFIRPIPTWDEWPEFARETFQAFRTTDVGRKLIIDQNVFIEGTLPMGVVRPLTEVEMDHYREPFLNPVDREPLWRFPNELPIAGEPANIVALVEEYMDWLHQSPVPKLLFWGTPGVLIPPAEAARLAKSLPNCKAVDIGPNLNLLQEDNPDLIGSEIARWLSTLEISG

SEQ ID NO: 2674 - protein, 277 aa, Synthetic construct
MFHYVDVGPRDGTPVLFLHGNPTSSYVWRNIIPHVAPTHRCIAPDLIGMGKSDKPDLGYFFDDHVRFMDAFIEALGLEEVVLVIHDWGSALGFHWAKRNPERVKGIAFMEFIRPIPTWDEWPEFARETFQAFRTTDVGRKLIIDQNVFIEGTLPMGVVRPLTEVEMDHYREPFLNPVDREPLWRFPNELPIAGEPANIVALVEEYMDWLHQSPVPKLLFWGTPGVLIPPAEAARLAKSLPNCKAVDIGPGINLLQEDNPDLIGSEIARWLSTLEISG

SEQ ID NO: 2675 - protein, 277 aa, Synthetic construct
MFHYVDVGPRDGTPVLFLHGNPTSSYVWRNIIPHVAPTHRCIAPDLIGMGKSDKPDLGYFFDDHVRFMDAFIEALGLEEVVLVIHDWGSALGFHWAKRNPERVKGIAFMEFIRPIPTWDEWPEFARETFQAFRTTDVGRKLIIDQNVFIEGTLPMGVVRPLTEVEMDHYREPFLNPVDREPLWRFPNELPIAGEPANIVALVEEYMDWLHQSPVPKLLFWGTPGVLIPPAEAARLAKSLPNCKAVDIGPGVNLLQEDNPDLIGSEIARWLSTLEISG

SEQ ID NO: 2676 - protein, 277 aa, Synthetic construct
MFHYVDVGPRDGTPVLFLHGNPTSSYVWRNIIPHVAPTHRCIAPDLIGMGKSDKPDLGYFFDDHVRFMDAFIEALGLEEVVLVIHDWGSALGFHWAKRNPERVKGIAFMEFIRPIPTWDEWPEFARETFQAFRTTDVGRKLIIDQNVFIEGTLPMGVVRPLTEVEMDHYREPFLNPVDREPLWRFPNELPIAGEPANIVALVEEYMDWLHQSPVPKLLFWGTPGVLIPPAEAARLAKSLPNCKAVDIGPGRNLLQEDNPDLIGSEIARWLSTLEISG

SEQ ID NO: 2677 - protein, 277 aa, Synthetic construct
MFHYVDVGPRDGTPVLFLHGNPTSSYVWRNIIPHVAPTHRCIAPDLIGMGKSDKPDLGYFFDDHVRFMDAFIEALGLEEVVLVIHDWGSALGFHWAKRNPERVKGIAFMEFIRPIPTWDEWPEFARETFQAFRTTDVGRKLIIDQNVFIEGTLPMGVVRPLTEVEMDHYREPFLNPVDREPLWRFPNELPIAGEPANIVALVEEYMDWLHQSPVPKLLFWGTPGVLIPPAEAARLAKSLPNCKAVDIGPGKNLLQEDNPDLIGSEIARWLSTLEISG

SEQ ID NO: 2678 - protein, 277 aa, Synthetic construct
MFHYVDVGPRDGTPVLFLHGNPTSSYVWRNIIPHVAPTHRCIAPDLIGMGKSDKPDLGYFFDDHVRFMDAFIEALGLEEVVLVIHDWGSALGFHWAKRNPERVKGIAFMEFIRPIPTWDEWPEFARETFQAFRTTDVGRKLIIDQNVFIEGTLPMGVVRPLTEVEMDHYREPFLNPVDREPLWRFPNELPIAGEPANIVALVEEYMDWLHQSPVPKLLFWGTPGVLIPPAEAARLAKSLPNCKAVDIGPGANLLQEDNPDLIGSEIARWLSTLEISG

SEQ ID NO: 2679 - protein, 277 aa, Synthetic construct
MFHYVDVGPRDGTPVLFLHGNPTSSYVWRNIIPHVAPTHRCIAPDLIGMGKSDKPDLGYFFDDHVRFMDAFIEALGLEEVVLVIHDWGSALGFHWAKRNPERVKGIAFMEFIRPIPTWDEWPEFARETFQAFRTTDVGRKLIIDQNVFIEGTLPMGVVRPLTEVEMDHYREPFLNPVDREPLWRFPNELPIAGEPANIVALVEEYMDWLHQSPVPKLLFWGTPGVLIPPAEAARLAKSLPNCKAVDIGPGLHLLQEDNPDLIGSEIARWLSTLEISG

SEQ ID NO: 2680 - protein, 277 aa, Synthetic construct
MFHYVDVGPRDGTPVLFLHGNPTSSYVWRNIIPHVAPTHRCIAPDLIGMGKSDKPDLGYFFDDHVRFMDAFIEALGLEEVVLVIHDWGSALGFHWAKRNPERVKGIAFMEFIRPIPTWDEWPEFARETFQAFRTTDVGRKLIIDQNVFIEGTLPMGVVRPLTEVEMDHYREPFLNPVDREPLWRFPNELPIAGEPANIVALVEEYMDWLHQSPVPKLLFWGTPGVLIPPAEAARLAKSLPNCKAVDIGPGLYLLQEDNPDLIGSEIARWLSTLEISG

SEQ ID NO: 2681 - protein, 277 aa, Synthetic construct
MFHYVDVGPRDGTPVLFLHGNPTSSYVWRNIIPHVAPTHRCIAPDLIGMGKSDKPDLGYFFDDHVRFMDAFIEALGLEEVVLVIHDWGSALGFHWAKRNPERVKGIAFMEFIRPIPTWDEWPEFARETFQAFRTTDVGRKLIIDQNVFIEGTLPMGVVRPLTEVEMDHYREPFLNPVDREPLWRFPNELPIAGEPANIVALVEEYMDWLHQSPVPKLLFWGTPGVLIPPAEAARLAKSLPNCKAVDIGPGLQLLQEDNPDLIGSEIARWLSTLEISG

SEQ ID NO: 2682 - protein, 277 aa, Synthetic construct
MFHYVDVGPRDGTPVLFLHGNPTSSYVWRNIIPHVAPTHRCIAPDLIGMGKSDKPDLGYFFDDHVRFMDAFIEALGLEEVVLVIHDWGSALGFHWAKRNPERVKGIAFMEFIRPIPTWDEWPEFARETFQAFRTTDVGRKLIIDQNVFIEGTLPMGVVRPLTEVEMDHYREPFLNPVDREPLWRFPNELPIAGEPANIVALVEEYMDWLHQSPVPKLLFWGTPGVLIPPAEAARLAKSLPNCKAVDIGPGLLLLQEDNPDLIGSEIARWLSTLEISG

SEQ ID NO: 2683 - protein, 277 aa, Synthetic construct
MFHYVDVGPRDGTPVLFLHGNPTSSYVWRNIIPHVAPTHRCIAPDLIGMGKSDKPDLGYFFDDHVRFMDAFIEALGLEEVVLVIHDWGSALGFHWAKRNPERVKGIAFMEFIRPIPTWDEWPEFARETFQAFRTTDVGRKLIIDQNVFIEGTLPMGVVRPLTEVEMDHYREPFLNPVDREPLWRFPNELPIAGEPANIVALVEEYMDWLHQSPVPKLLFWGTPGVLIPPAEAARLAKSLPNCKAVDIGPGLFLLQEDNPDLIGSEIARWLSTLEISG

SEQ ID NO: 2684 - protein, 277 aa, Synthetic construct
MFHYVDVGPRDGTPVLFLHGNPTSSYVWRNIIPHVAPTHRCIAPDLIGMGKSDKPDLGYFFDDHVRFMDAFIEALGLEEVVLVIHDWGSALGFHWAKRNPERVKGIAFMEFIRPIPTWDEWPEFARETFQAFRTTDVGRKLIIDQNVFIEGTLPMGVVRPLTEVEMDHYREPFLNPVDREPLWRFPNELPIAGEPANIVALVEEYMDWLHQSPVPKLLFWGTPGVLIPPAEAARLAKSLPNCKAVDIGPGLSLLQEDNPDLIGSEIARWLSTLEISG

SEQ ID NO: 2685 - protein, 277 aa, Synthetic construct
MFHYVDVGPRDGTPVLFLHGNPTSSYVWRNIIPHVAPTHRCIAPDLIGMGKSDKPDLGYFFDDHVRFMDAFIEALGLEEVVLVIHDWGSALGFHWAKRNPERVKGIAFMEFIRPIPTWDEWPEFARETFQAFRTTDVGRKLIIDQNVFIEGTLPMGVVRPLTEVEMDHYREPFLNPVDREPLWRFPNELPIAGEPANIVALVEEYMDWLHQSPVPKLLFWGTPGVLIPPAEAARLAKSLPNCKAVDIGPGLNFLQEDNPDLIGSEIARWLSTLEISG

SEQ ID NO: 2686 - protein, 277 aa, Synthetic construct
MFHYVDVGPRDGTPVLFLHGNPTSSYVWRNIIPHVAPTHRCIAPDLIGMGKSDKPDLGYFFDDHVRFMDAFIEALGLEEVVLVIHDWGSALGFHWAKRNPERVKGIAFMEFIRPIPTWDEWPEFARETFQAFRTTDVGRKLIIDQNVFIEGTLPMGVVRPLTEVEMDHYREPFLNPVDREPLWRFPNELPIAGEPANIVALVEEYMDWLHQSPVPKLLFWGTPGVLIPPAEAARLAKSLPNCKAVDIGPGLNYLQEDNPDLIGSEIARWLSTLEISG

SEQ ID NO: 2687 - protein, 277 aa, Synthetic construct
MFHYVDVGPRDGTPVLFLHGNPTSSYVWRNIIPHVAPTHRCIAPDLIGMGKSDKPDLGYFFDDHVRFMDAFIEALGLEEVVLVIHDWGSALGFHWAKRNPERVKGIAFMEFIRPIPTWDEWPEFARETFQAFRTTDVGRKLIIDQNVFIEGTLPMGVVRPLTEVEMDHYREPFLNPVDREPLWRFPNELPIAGEPANIVALVEEYMDWLHQSPVPKLLFWGTPGVLIPPAEAARLAKSLPNCKAVDIGPGLNHLQEDNPDLIGSEIARWLSTLEISG

SEQ ID NO: 2688 - protein, 277 aa, Synthetic construct
MFHYVDVGPRDGTPVLFLHGNPTSSYVWRNIIPHVAPTHRCIAPDLIGMGKSDKPDLGYFFDDHVRFMDAFIEALGLEEVVLVIHDWGSALGFHWAKRNPERVKGIAFMEFIRPIPTWDEWPEFARETFQAFRTTDVGRKLIIDQNVFIEGTLPMGVVRPLTEVEMDHYREPFLNPVDREPLWRFPNELPIAGEPANIVALVEEYMDWLHQSPVPKLLFWGTPGVLIPPAEAARLAKSLPNCKAVDIGPGLNWLQEDNPDLIGSEIARWLSTLEISG

SEQ ID NO: 2689 - protein, 277 aa, Synthetic construct
MFHYVDVGPRDGTPVLFLHGNPTSSYVWRNIIPHVAPTHRCIAPDLIGMGKSDKPDLGYFFDDHVRFMDAFIEALGLEEVVLVIHDWGSALGFHWAKRNPERVKGIAFMEFIRPIPTWDEWPEFARETFQAFRTTDVGRKLIIDQNVFIEGTLPMGVVRPLTEVEMDHYREPFLNPVDREPLWRFPNELPIAGEPANIVALVEEYMDWLHQSPVPKLLFWGTPGVLIPPAEAARLAKSLPNCKAVDIGPGLNMLQEDNPDLIGSEIARWLSTLEISG

SEQ ID NO: 2690 - protein, 277 aa, Synthetic construct
MFHYVDVGPRDGTPVLFLHGNPTSSYVWRNIIPHVAPTHRCIAPDLIGMGKSDKPDLGYFFDDHVRFMDAFIEALGLEEVVLVIHDWGSALGFHWAKRNPERVKGIAFMEFIRPIPTWDEWPEFARETFQAFRTTDVGRKLIIDQNVFIEGTLPMGVVRPLTEVEMDHYREPFLNPVDREPLWRFPNELPIAGEPANIVALVEEYMDWLHQSPVPKLLFWGTPGVLIPPAEAARLAKSLPNCKAVDIGPGLNILQEDNPDLIGSEIARWLSTLEISG

SEQ ID NO: 2691 - protein, 277 aa, Synthetic construct
MFHYVDVGPRDGTPVLFLHGNPTSSYVWRNIIPHVAPTHRCIAPDLIGMGKSDKPDLGYFFDDHVRFMDAFIEALGLEEVVLVIHDWGSALGFHWAKRNPERVKGIAFMEFIRPIPTWDEWPEFARETFQAFRTTDVGRKLIIDQNVFIEGTLPMGVVRPLTEVEMDHYREPFLNPVDREPLWRFPNELPIAGEPANIVALVEEYMDWLHQSPVPKLLFWGTPGVLIPPAEAARLAKSLPNCKAVDIGPGLNLVQEDNPDLIGSEIARWLSTLEISG

SEQ ID NO: 2692 - protein, 277 aa, Synthetic construct
MFHYVDVGPRDGTPVLFLHGNPTSSYVWRNIIPHVAPTHRCIAPDLIGMGKSDKPDLGYFFDDHVRFMDAFIEALGLEEVVLVIHDWGSALGFHWAKRNPERVKGIAFMEFIRPIPTWDEWPEFARETFQAFRTTDVGRKLIIDQNVFIEGTLPMGVVRPLTEVEMDHYREPFLNPVDREPLWRFPNELPIAGEPANIVALVEEYMDWLHQSPVPKLLFWGTPGVLIPPAEAARLAKSLPNCKAVDIGPGLNLIQEDNPDLIGSEIARWLSTLEISG

SEQ ID NO: 2693 - protein, 277 aa, Synthetic construct
MFHYVDVGPRDGTPVLFLHGNPTSSYVWRNIIPHVAPTHRCIAPDLIGMGKSDKPDLGYFFDDHVRFMDAFIEALGLEEVVLVIHDWGSALGFHWAKRNPERVKGIAFMEFIRPIPTWDEWPEFARETFQAFRTTDVGRKLIIDQNVFIEGTLPMGVVRPLTEVEMDHYREPFLNPVDREPLWRFPNELPIAGEPANIVALVEEYMDWLHQSPVPKLLFWGTPGVLIPPAEAARLAKSLPNCKAVDIGPGLNLAQEDNPDLIGSEIARWLSTLEISG

SEQ ID NO: 2694 - protein, 277 aa, Synthetic construct
MFHYVDVGPRDGTPVLFLHGNPTSSYVWRNIIPHVAPTHRCIAPDLIGMGKSDKPDLGYFFDDHVRFMDAFIEALGLEEVVLVIHDWGSALGFHWAKRNPERVKGIAFMEFIRPIPTWDEWPEFARETFQAFRTTDVGRKLIIDQNVFIEGTLPMGVVRPLTEVEMDHYREPFLNPVDREPLWRFPNELPIAGEPANIVALVEEYMDWLHQSPVPKLLFWGTPGVLIPPAEAARLAKSLPNCKAVDIGPGLNLMQEDNPDLIGSEIARWLSTLEISG

SEQ ID NO: 2695 - protein, 277 aa, Synthetic construct
MFHYVDVGPRDGTPVLFLHGNPTSSYVWRNIIPHVAPTHRCIAPDLIGMGKSDKPDLGYFFDDHVRFMDAFIEALGLEEVVLVIHDWGSALGFHWAKRNPERVKGIAFMEFIRPIPTWDEWPEFARETFQAFRTTDVGRKLIIDQNVFIEGTLPMGVVRPLTEVEMDHYREPFLNPVDREPLWRFPNELPIAGEPANIVALVEEYMDWLHQSPVPKLLFWGTPGVLIPPAEAARLAKSLPNCKAVDIGPGLNLTQEDNPDLIGSEIARWLSTLEISG

SEQ ID NO: 2696 - protein, 277 aa, Synthetic construct
MFHYVDVGPRDGTPVLFLHGNPTSSYVWRNIIPHVAPTHRCIAPDLIGMGKSDKPDLGYFFDDHVRFMDAFIEALGLEEVVLVIHDWGSALGFHWAKRNPERVKGIAFMEFIRPIPTWDEWPEFARETFQAFRTTDVGRKLIIDQNVFIEGTLPMGVVRPLTEVEMDHYREPFLNPVDREPLWRFPNELPIAGEPANIVALVEEYMDWLHQSPVPKLLFWGTPGVLIPPAEAARLAKSLPNCKAVDIGPGLNLPQEDNPDLIGSEIARWLSTLEISG

SEQ ID NO: 2697 - protein, 277 aa, Synthetic construct
MFHYVDVGPRDGTPVLFLHGNPTSSYVWRNIIPHVAPTHRCIAPDLIGMGKSDKPDLGYFFDDHVRFMDAFIEALGLEEVVLVIHDWGSALGFHWAKRNPERVKGIAFMEFIRPIPTWDEWPEFARETFQAFRTTDVGRKLIIDQNVFIEGTLPMGVVRPLTEVEMDHYREPFLNPVDREPLWRFPNELPIAGEPANIVALVEEYMDWLHQSPVPKLLFWGTPGVLIPPAEAARLAKSLPNCKAVDIGPGLNLLPEDNPDLIGSEIARWLSTLEISG

SEQ ID NO: 2698 - protein, 277 aa, Synthetic construct
MFHYVDVGPRDGTPVLFLHGNPTSSYVWRNIIPHVAPTHRCIAPDLIGMGKSDKPDLGYFFDDHVRFMDAFIEALGLEEVVLVIHDWGSALGFHWAKRNPERVKGIAFMEFIRPIPTWDEWPEFARETFQAFRTTDVGRKLIIDQNVFIEGTLPMGVVRPLTEVEMDHYREPFLNPVDREPLWRFPNELPIAGEPANIVALVEEYMDWLHQSPVPKLLFWGTPGVLIPPAEAARLAKSLPNCKAVDIGPGLNLLHEDNPDLIGSEIARWLSTLEISG

SEQ ID NO: 2699 - protein, 277 aa, Synthetic construct
MFHYVDVGPRDGTPVLFLHGNPTSSYVWRNIIPHVAPTHRCIAPDLIGMGKSDKPDLGYFFDDHVRFMDAFIEALGLEEVVLVIHDWGSALGFHWAKRNPERVKGIAFMEFIRPIPTWDEWPEFARETFQAFRTTDVGRKLIIDQNVFIEGTLPMGVVRPLTEVEMDHYREPFLNPVDREPLWRFPNELPIAGEPANIVALVEEYMDWLHQSPVPKLLFWGTPGVLIPPAEAARLAKSLPNCKAVDIGPGLNLLAEDNPDLIGSEIARWLSTLEISG

SEQ ID NO: 2700 - protein, 277 aa, Synthetic construct
MFHYVDVGPRDGTPVLFLHGNPTSSYVWRNIIPHVAPTHRCIAPDLIGMGKSDKPDLGYFFDDHVRFMDAFIEALGLEEVVLVIHDWGSALGFHWAKRNPERVKGIAFMEFIRPIPTWDEWPEFARETFQAFRTTDVGRKLIIDQNVFIEGTLPMGVVRPLTEVEMDHYREPFLNPVDREPLWRFPNELPIAGEPANIVALVEEYMDWLHQSPVPKLLFWGTPGVLIPPAEAARLAKSLPNCKAVDIGPGLNLLTEDNPDLIGSEIARWLSTLEISG

SEQ ID NO: 2701 - protein, 277 aa, Synthetic construct
MFHYVDVGPRDGTPVLFLHGNPTSSYVWRNIIPHVAPTHRCIAPDLIGMGKSDKPDLGYFFDDHVRFMDAFIEALGLEEVVLVIHDWGSALGFHWAKRNPERVKGIAFMEFIRPIPTWDEWPEFARETFQAFRTTDVGRKLIIDQNVFIEGTLPMGVVRPLTEVEMDHYREPFLNPVDREPLWRFPNELPIAGEPANIVALVEEYMDWLHQSPVPKLLFWGTPGVLIPPAEAARLAKSLPNCKAVDIGPGLNLLLEDNPDLIGSEIARWLSTLEISG

SEQ ID NO: 2702 - protein, 277 aa, Synthetic construct
MFHYVDVGPRDGTPVLFLHGNPTSSYVWRNIIPHVAPTHRCIAPDLIGMGKSDKPDLGYFFDDHVRFMDAFIEALGLEEVVLVIHDWGSALGFHWAKRNPERVKGIAFMEFIRPIPTWDEWPEFARETFQAFRTTDVGRKLIIDQNVFIEGTLPMGVVRPLTEVEMDHYREPFLNPVDREPLWRFPNELPIAGEPANIVALVEEYMDWLHQSPVPKLLFWGTPGVLIPPAEAARLAKSLPNCKAVDIGPGLNLLVEDNPDLIGSEIARWLSTLEISG

SEQ ID NO: 2703 - protein, 277 aa, Synthetic construct
MFHYVDVGPRDGTPVLFLHGNPTSSYVWRNIIPHVAPTHRCIAPDLIGMGKSDKPDLGYFFDDHVRFMDAFIEALGLEEVVLVIHDWGSALGFHWAKRNPERVKGIAFMEFIRPIPTWDEWPEFARETFQAFRTTDVGRKLIIDQNVFIEGTLPMGVVRPLTEVEMDHYREPFLNPVDREPLWRFPNELPIAGEPANIVALVEEYMDWLHQSPVPKLLFWGTPGVLIPPAEAARLAKSLPNCKAVDIGPGLNLLQDDNPDLIGSEIARWLSTLEISG

SEQ ID NO: 2704 - protein, 277 aa, Synthetic construct
MFHYVDVGPRDGTPVLFLHGNPTSSYVWRNIIPHVAPTHRCIAPDLIGMGKSDKPDLGYFFDDHVRFMDAFIEALGLEEVVLVIHDWGSALGFHWAKRNPERVKGIAFMEFIRPIPTWDEWPEFARETFQAFRTTDVGRKLIIDQNVFIEGTLPMGVVRPLTEVEMDHYREPFLNPVDREPLWRFPNELPIAGEPANIVALVEEYMDWLHQSPVPKLLFWGTPGVLIPPAEAARLAKSLPNCKAVDIGPGLNLLQQDNPDLIGSEIARWLSTLEISG

SEQ ID NO: 2705 - protein, 277 aa, Synthetic construct
MFHYVDVGPRDGTPVLFLHGNPTSSYVWRNIIPHVAPTHRCIAPDLIGMGKSDKPDLGYFFDDHVRFMDAFIEALGLEEVVLVIHDWGSALGFHWAKRNPERVKGIAFMEFIRPIPTWDEWPEFARETFQAFRTTDVGRKLIIDQNVFIEGTLPMGVVRPLTEVEMDHYREPFLNPVDREPLWRFPNELPIAGEPANIVALVEEYMDWLHQSPVPKLLFWGTPGVLIPPAEAARLAKSLPNCKAVDIGPGLNLLQADNPDLIGSEIARWLSTLEISG

SEQ ID NO: 2706 - protein, 277 aa, Synthetic construct
MFHYVDVGPRDGTPVLFLHGNPTSSYVWRNIIPHVAPTHRCIAPDLIGMGKSDKPDLGYFFDDHVRFMDAFIEALGLEEVVLVIHDWGSALGFHWAKRNPERVKGIAFMEFIRPIPTWDEWPEFARETFQAFRTTDVGRKLIIDQNVFIEGTLPMGVVRPLTEVEMDHYREPFLNPVDREPLWRFPNELPIAGEPANIVALVEEYMDWLHQSPVPKLLFWGTPGVLIPPAEAARLAKSLPNCKAVDIGPGLNLLQHDNPDLIGSEIARWLSTLEISG

SEQ ID NO: 2707 - protein, 277 aa, Synthetic construct
MFHYVDVGPRDGTPVLFLHGNPTSSYVWRNIIPHVAPTHRCIAPDLIGMGKSDKPDLGYFFDDHVRFMDAFIEALGLEEVVLVIHDWGSALGFHWAKRNPERVKGIAFMEFIRPIPTWDEWPEFARETFQAFRTTDVGRKLIIDQNVFIEGTLPMGVVRPLTEVEMDHYREPFLNPVDREPLWRFPNELPIAGEPANIVALVEEYMDWLHQSPVPKLLFWGTPGVLIPPAEAARLAKSLPNCKAVDIGPGLNLLQSDNPDLIGSEIARWLSTLEISG

SEQ ID NO: 2708 - protein, 277 aa, Synthetic construct
MFHYVDVGPRDGTPVLFLHGNPTSSYVWRNIIPHVAPTHRCIAPDLIGMGKSDKPDLGYFFDDHVRFMDAFIEALGLEEVVLVIHDWGSALGFHWAKRNPERVKGIAFMEFIRPIPTWDEWPEFARETFQAFRTTDVGRKLIIDQNVFIEGTLPMGVVRPLTEVEMDHYREPFLNPVDREPLWRFPNELPIAGEPANIVALVEEYMDWLHQSPVPKLLFWGTPGVLIPPAEAARLAKSLPNCKAVDIGPGLNLLQVDNPDLIGSEIARWLSTLEISG

SEQ ID NO: 2709 - protein, 277 aa, Synthetic construct
MFHYVDVGPRDGTPVLFLHGNPTSSYVWRNIIPHVAPTHRCIAPDLIGMGKSDKPDLGYFFDDHVRFMDAFIEALGLEEVVLVIHDWGSALGFHWAKRNPERVKGIAFMEFIRPIPTWDEWPEFARETFQAFRTTDVGRKLIIDQNVFIEGTLPMGVVRPLTEVEMDHYREPFLNPVDREPLWRFPNELPIAGEPANIVALVEEYMDWLHQSPVPKLLFWGTPGVLIPPAEAARLAKSLPNCKAVDIGPGLNLLQEENPDLIGSEIARWLSTLEISG

SEQ ID NO: 2710 - protein, 277 aa, Synthetic construct
MFHYVDVGPRDGTPVLFLHGNPTSSYVWRNIIPHVAPTHRCIAPDLIGMGKSDKPDLGYFFDDHVRFMDAFIEALGLEEVVLVIHDWGSALGFHWAKRNPERVKGIAFMEFIRPIPTWDEWPEFARETFQAFRTTDVGRKLIIDQNVFIEGTLPMGVVRPLTEVEMDHYREPFLNPVDREPLWRFPNELPIAGEPANIVALVEEYMDWLHQSPVPKLLFWGTPGVLIPPAEAARLAKSLPNCKAVDIGPGLNLLQENNPDLIGSEIARWLSTLEISG

SEQ ID NO: 2711 - protein, 277 aa, Synthetic construct
MFHYVDVGPRDGTPVLFLHGNPTSSYVWRNIIPHVAPTHRCIAPDLIGMGKSDKPDLGYFFDDHVRFMDAFIEALGLEEVVLVIHDWGSALGFHWAKRNPERVKGIAFMEFIRPIPTWDEWPEFARETFQAFRTTDVGRKLIIDQNVFIEGTLPMGVVRPLTEVEMDHYREPFLNPVDREPLWRFPNELPIAGEPANIVALVEEYMDWLHQSPVPKLLFWGTPGVLIPPAEAARLAKSLPNCKAVDIGPGLNLLQESNPDLIGSEIARWLSTLEISG

SEQ ID NO: 2712 - protein, 277 aa, Synthetic construct
MFHYVDVGPRDGTPVLFLHGNPTSSYVWRNIIPHVAPTHRCIAPDLIGMGKSDKPDLGYFFDDHVRFMDAFIEALGLEEVVLVIHDWGSALGFHWAKRNPERVKGIAFMEFIRPIPTWDEWPEFARETFQAFRTTDVGRKLIIDQNVFIEGTLPMGVVRPLTEVEMDHYREPFLNPVDREPLWRFPNELPIAGEPANIVALVEEYMDWLHQSPVPKLLFWGTPGVLIPPAEAARLAKSLPNCKAVDIGPGLNLLQEHNPDLIGSEIARWLSTLEISG

SEQ ID NO: 2713 - protein, 277 aa, Synthetic construct
MFHYVDVGPRDGTPVLFLHGNPTSSYVWRNIIPHVAPTHRCIAPDLIGMGKSDKPDLGYFFDDHVRFMDAFIEALGLEEVVLVIHDWGSALGFHWAKRNPERVKGIAFMEFIRPIPTWDEWPEFARETFQAFRTTDVGRKLIIDQNVFIEGTLPMGVVRPLTEVEMDHYREPFLNPVDREPLWRFPNELPIAGEPANIVALVEEYMDWLHQSPVPKLLFWGTPGVLIPPAEAARLAKSLPNCKAVDIGPGLNLLQEANPDLIGSEIARWLSTLEISG

SEQ ID NO: 2714 - protein, 277 aa, Synthetic construct
MFHYVDVGPRDGTPVLFLHGNPTSSYVWRNIIPHVAPTHRCIAPDLIGMGKSDKPDLGYFFDDHVRFMDAFIEALGLEEVVLVIHDWGSALGFHWAKRNPERVKGIAFMEFIRPIPTWDEWPEFARETFQAFRTTDVGRKLIIDQNVFIEGTLPMGVVRPLTEVEMDHYREPFLNPVDREPLWRFPNELPIAGEPANIVALVEEYMDWLHQSPVPKLLFWGTPGVLIPPAEAARLAKSLPNCKAVDIGPGLNLLQETNPDLIGSEIARWLSTLEISG

SEQ ID NO: 2715 - protein, 277 aa, Synthetic construct
MFHYVDVGPRDGTPVLFLHGNPTSSYVWRNIIPHVAPTHRCIAPDLIGMGKSDKPDLGYFFDDHVRFMDAFIEALGLEEVVLVIHDWGSALGFHWAKRNPERVKGIAFMEFIRPIPTWDEWPEFARETFQAFRTTDVGRKLIIDQNVFIEGTLPMGVVRPLTEVEMDHYREPFLNPVDREPLWRFPNELPIAGEPANIVALVEEYMDWLHQSPVPKLLFWGTPGVLIPPAEAARLAKSLPNCKAVDIGPGLNLLQEDAPDLIGSEIARWLSTLEISG

SEQ ID NO: 2716 - protein, 277 aa, Synthetic construct
MFHYVDVGPRDGTPVLFLHGNPTSSYVWRNIIPHVAPTHRCIAPDLIGMGKSDKPDLGYFFDDHVRFMDAFIEALGLEEVVLVIHDWGSALGFHWAKRNPERVKGIAFMEFIRPIPTWDEWPEFARETFQAFRTTDVGRKLIIDQNVFIEGTLPMGVVRPLTEVEMDHYREPFLNPVDREPLWRFPNELPIAGEPANIVALVEEYMDWLHQSPVPKLLFWGTPGVLIPPAEAARLAKSLPNCKAVDIGPGLNLLQEDQPDLIGSEIARWLSTLEISG

SEQ ID NO: 2717 - protein, 277 aa, Synthetic construct
MFHYVDVGPRDGTPVLFLHGNPTSSYVWRNIIPHVAPTHRCIAPDLIGMGKSDKPDLGYFFDDHVRFMDAFIEALGLEEVVLVIHDWGSALGFHWAKRNPERVKGIAFMEFIRPIPTWDEWPEFARETFQAFRTTDVGRKLIIDQNVFIEGTLPMGVVRPLTEVEMDHYREPFLNPVDREPLWRFPNELPIAGEPANIVALVEEYMDWLHQSPVPKLLFWGTPGVLIPPAEAARLAKSLPNCKAVDIGPGLNLLQEDSPDLIGSEIARWLSTLEISG

SEQ ID NO: 2718 - protein, 277 aa, Synthetic construct
MFHYVDVGPRDGTPVLFLHGNPTSSYVWRNIIPHVAPTHRCIAPDLIGMGKSDKPDLGYFFDDHVRFMDAFIEALGLEEVVLVIHDWGSALGFHWAKRNPERVKGIAFMEFIRPIPTWDEWPEFARETFQAFRTTDVGRKLIIDQNVFIEGTLPMGVVRPLTEVEMDHYREPFLNPVDREPLWRFPNELPIAGEPANIVALVEEYMDWLHQSPVPKLLFWGTPGVLIPPAEAARLAKSLPNCKAVDIGPGLNLLQEDHPDLIGSEIARWLSTLEISG

SEQ ID NO: 2719 - protein, 277 aa, Synthetic construct
MFHYVDVGPRDGTPVLFLHGNPTSSYVWRNIIPHVAPTHRCIAPDLIGMGKSDKPDLGYFFDDHVRFMDAFIEALGLEEVVLVIHDWGSALGFHWAKRNPERVKGIAFMEFIRPIPTWDEWPEFARETFQAFRTTDVGRKLIIDQNVFIEGTLPMGVVRPLTEVEMDHYREPFLNPVDREPLWRFPNELPIAGEPANIVALVEEYMDWLHQSPVPKLLFWGTPGVLIPPAEAARLAKSLPNCKAVDIGPGLNLLQEDRPDLIGSEIARWLSTLEISG

SEQ ID NO: 2720 - protein, 277 aa, Synthetic construct
MFHYVDVGPRDGTPVLFLHGNPTSSYVWRNIIPHVAPTHRCIAPDLIGMGKSDKPDLGYFFDDHVRFMDAFIEALGLEEVVLVIHDWGSALGFHWAKRNPERVKGIAFMEFIRPIPTWDEWPEFARETFQAFRTTDVGRKLIIDQNVFIEGTLPMGVVRPLTEVEMDHYREPFLNPVDREPLWRFPNELPIAGEPANIVALVEEYMDWLHQSPVPKLLFWGTPGVLIPPAEAARLAKSLPNCKAVDIGPGLNLLQEDKPDLIGSEIARWLSTLEISG

SEQ ID NO: 2721 - protein, 277 aa, Synthetic construct
MFHYVDVGPRDGTPVLFLHGNPTSSYVWRNIIPHVAPTHRCIAPDLIGMGKSDKPDLGYFFDDHVRFMDAFIEALGLEEVVLVIHDWGSALGFHWAKRNPERVKGIAFMEFIRPIPTWDEWPEFARETFQAFRTTDVGRKLIIDQNVFIEGTLPMGVVRPLTEVEMDHYREPFLNPVDREPLWRFPNELPIAGEPANIVALVEEYMDWLHQSPVPKLLFWGTPGVLIPPAEAARLAKSLPNCKAVDIGPGLNLLQEDNADLIGSEIARWLSTLEISG

SEQ ID NO: 2722 - protein, 277 aa, Synthetic construct
MFHYVDVGPRDGTPVLFLHGNPTSSYVWRNIIPHVAPTHRCIAPDLIGMGKSDKPDLGYFFDDHVRFMDAFIEALGLEEVVLVIHDWGSALGFHWAKRNPERVKGIAFMEFIRPIPTWDEWPEFARETFQAFRTTDVGRKLIIDQNVFIEGTLPMGVVRPLTEVEMDHYREPFLNPVDREPLWRFPNELPIAGEPANIVALVEEYMDWLHQSPVPKLLFWGTPGVLIPPAEAARLAKSLPNCKAVDIGPGLNLLQEDNGDLIGSEIARWLSTLEISG

SEQ ID NO: 2723 - protein, 277 aa, Synthetic construct
MFHYVDVGPRDGTPVLFLHGNPTSSYVWRNIIPHVAPTHRCIAPDLIGMGKSDKPDLGYFFDDHVRFMDAFIEALGLEEVVLVIHDWGSALGFHWAKRNPERVKGIAFMEFIRPIPTWDEWPEFARETFQAFRTTDVGRKLIIDQNVFIEGTLPMGVVRPLTEVEMDHYREPFLNPVDREPLWRFPNELPIAGEPANIVALVEEYMDWLHQSPVPKLLFWGTPGVLIPPAEAARLAKSLPNCKAVDIGPGLNLLQEDNSDLIGSEIARWLSTLEISG

SEQ ID NO: 2724 - protein, 277 aa, Synthetic construct
MFHYVDVGPRDGTPVLFLHGNPTSSYVWRNIIPHVAPTHRCIAPDLIGMGKSDKPDLGYFFDDHVRFMDAFIEALGLEEVVLVIHDWGSALGFHWAKRNPERVKGIAFMEFIRPIPTWDEWPEFARETFQAFRTTDVGRKLIIDQNVFIEGTLPMGVVRPLTEVEMDHYREPFLNPVDREPLWRFPNELPIAGEPANIVALVEEYMDWLHQSPVPKLLFWGTPGVLIPPAEAARLAKSLPNCKAVDIGPGLNLLQEDNHDLIGSEIARWLSTLEISG

SEQ ID NO: 2725 - protein, 277 aa, Synthetic construct
MFHYVDVGPRDGTPVLFLHGNPTSSYVWRNIIPHVAPTHRCIAPDLIGMGKSDKPDLGYFFDDHVRFMDAFIEALGLEEVVLVIHDWGSALGFHWAKRNPERVKGIAFMEFIRPIPTWDEWPEFARETFQAFRTTDVGRKLIIDQNVFIEGTLPMGVVRPLTEVEMDHYREPFLNPVDREPLWRFPNELPIAGEPANIVALVEEYMDWLHQSPVPKLLFWGTPGVLIPPAEAARLAKSLPNCKAVDIGPGLNLLQEDNTDLIGSEIARWLSTLEISG

SEQ ID NO: 2726 - protein, 277 aa, Synthetic construct
MFHYVDVGPRDGTPVLFLHGNPTSSYVWRNIIPHVAPTHRCIAPDLIGMGKSDKPDLGYFFDDHVRFMDAFIEALGLEEVVLVIHDWGSALGFHWAKRNPERVKGIAFMEFIRPIPTWDEWPEFARETFQAFRTTDVGRKLIIDQNVFIEGTLPMGVVRPLTEVEMDHYREPFLNPVDREPLWRFPNELPIAGEPANIVALVEEYMDWLHQSPVPKLLFWGTPGVLIPPAEAARLAKSLPNCKAVDIGPGLNLLQEDNLDLIGSEIARWLSTLEISG

SEQ ID NO: 2727 - protein, 277 aa, Synthetic construct
MFHYVDVGPRDGTPVLFLHGNPTSSYVWRNIIPHVAPTHRCIAPDLIGMGKSDKPDLGYFFDDHVRFMDAFIEALGLEEVVLVIHDWGSALGFHWAKRNPERVKGIAFMEFIRPIPTWDEWPEFARETFQAFRTTDVGRKLIIDQNVFIEGTLPMGVVRPLTEVEMDHYREPFLNPVDREPLWRFPNELPIAGEPANIVALVEEYMDWLHQSPVPKLLFWGTPGVLIPPAEAARLAKSLPNCKAVDIGPGLNLLQEDNPELIGSEIARWLSTLEISG

SEQ ID NO: 2728 - protein, 277 aa, Synthetic construct
MFHYVDVGPRDGTPVLFLHGNPTSSYVWRNIIPHVAPTHRCIAPDLIGMGKSDKPDLGYFFDDHVRFMDAFIEALGLEEVVLVIHDWGSALGFHWAKRNPERVKGIAFMEFIRPIPTWDEWPEFARETFQAFRTTDVGRKLIIDQNVFIEGTLPMGVVRPLTEVEMDHYREPFLNPVDREPLWRFPNELPIAGEPANIVALVEEYMDWLHQSPVPKLLFWGTPGVLIPPAEAARLAKSLPNCKAVDIGPGLNLLQEDNPALIGSEIARWLSTLEISG

SEQ ID NO: 2729 - protein, 277 aa, Synthetic construct
MFHYVDVGPRDGTPVLFLHGNPTSSYVWRNIIPHVAPTHRCIAPDLIGMGKSDKPDLGYFFDDHVRFMDAFIEALGLEEVVLVIHDWGSALGFHWAKRNPERVKGIAFMEFIRPIPTWDEWPEFARETFQAFRTTDVGRKLIIDQNVFIEGTLPMGVVRPLTEVEMDHYREPFLNPVDREPLWRFPNELPIAGEPANIVALVEEYMDWLHQSPVPKLLFWGTPGVLIPPAEAARLAKSLPNCKAVDIGPGLNLLQEDNPQLIGSEIARWLSTLEISG

SEQ ID NO: 2730 - protein, 277 aa, Synthetic construct
MFHYVDVGPRDGTPVLFLHGNPTSSYVWRNIIPHVAPTHRCIAPDLIGMGKSDKPDLGYFFDDHVRFMDAFIEALGLEEVVLVIHDWGSALGFHWAKRNPERVKGIAFMEFIRPIPTWDEWPEFARETFQAFRTTDVGRKLIIDQNVFIEGTLPMGVVRPLTEVEMDHYREPFLNPVDREPLWRFPNELPIAGEPANIVALVEEYMDWLHQSPVPKLLFWGTPGVLIPPAEAARLAKSLPNCKAVDIGPGLNLLQEDNPHLIGSEIARWLSTLEISG

SEQ ID NO: 2731 - protein, 277 aa, Synthetic construct
MFHYVDVGPRDGTPVLFLHGNPTSSYVWRNIIPHVAPTHRCIAPDLIGMGKSDKPDLGYFFDDHVRFMDAFIEALGLEEVVLVIHDWGSALGFHWAKRNPERVKGIAFMEFIRPIPTWDEWPEFARETFQAFRTTDVGRKLIIDQNVFIEGTLPMGVVRPLTEVEMDHYREPFLNPVDREPLWRFPNELPIAGEPANIVALVEEYMDWLHQSPVPKLLFWGTPGVLIPPAEAARLAKSLPNCKAVDIGPGLNLLQEDNPGLIGSEIARWLSTLEISG

SEQ ID NO: 2732 - protein, 277 aa, Synthetic construct
MFHYVDVGPRDGTPVLFLHGNPTSSYVWRNIIPHVAPTHRCIAPDLIGMGKSDKPDLGYFFDDHVRFMDAFIEALGLEEVVLVIHDWGSALGFHWAKRNPERVKGIAFMEFIRPIPTWDEWPEFARETFQAFRTTDVGRKLIIDQNVFIEGTLPMGVVRPLTEVEMDHYREPFLNPVDREPLWRFPNELPIAGEPANIVALVEEYMDWLHQSPVPKLLFWGTPGVLIPPAEAARLAKSLPNCKAVDIGPGLNLLQEDNPTLIGSEIARWLSTLEISG

SEQ ID NO: 2733 - protein, 277 aa, Synthetic construct
MFHYVDVGPRDGTPVLFLHGNPTSSYVWRNIIPHVAPTHRCIAPDLIGMGKSDKPDLGYFFDDHVRFMDAFIEALGLEEVVLVIHDWGSALGFHWAKRNPERVKGIAFMEFIRPIPTWDEWPEFARETFQAFRTTDVGRKLIIDQNVFIEGTLPMGVVRPLTEVEMDHYREPFLNPVDREPLWRFPNELPIAGEPANIVALVEEYMDWLHQSPVPKLLFWGTPGVLIPPAEAARLAKSLPNCKAVDIGPGLNLLQEDNPDAIGSEIARWLSTLEISG

SEQ ID NO: 2734 - protein, 277 aa, Synthetic construct
MFHYVDVGPRDGTPVLFLHGNPTSSYVWRNIIPHVAPTHRCIAPDLIGMGKSDKPDLGYFFDDHVRFMDAFIEALGLEEVVLVIHDWGSALGFHWAKRNPERVKGIAFMEFIRPIPTWDEWPEFARETFQAFRTTDVGRKLIIDQNVFIEGTLPMGVVRPLTEVEMDHYREPFLNPVDREPLWRFPNELPIAGEPANIVALVEEYMDWLHQSPVPKLLFWGTPGVLIPPAEAARLAKSLPNCKAVDIGPGLNLLQEDNPDVIGSEIARWLSTLEISG

SEQ ID NO: 2735 - protein, 277 aa, Synthetic construct
MFHYVDVGPRDGTPVLFLHGNPTSSYVWRNIIPHVAPTHRCIAPDLIGMGKSDKPDLGYFFDDHVRFMDAFIEALGLEEVVLVIHDWGSALGFHWAKRNPERVKGIAFMEFIRPIPTWDEWPEFARETFQAFRTTDVGRKLIIDQNVFIEGTLPMGVVRPLTEVEMDHYREPFLNPVDREPLWRFPNELPIAGEPANIVALVEEYMDWLHQSPVPKLLFWGTPGVLIPPAEAARLAKSLPNCKAVDIGPGLNLLQEDNPDEIGSEIARWLSTLEISG

SEQ ID NO: 2736 - protein, 277 aa, Synthetic construct
MFHYVDVGPRDGTPVLFLHGNPTSSYVWRNIIPHVAPTHRCIAPDLIGMGKSDKPDLGYFFDDHVRFMDAFIEALGLEEVVLVIHDWGSALGFHWAKRNPERVKGIAFMEFIRPIPTWDEWPEFARETFQAFRTTDVGRKLIIDQNVFIEGTLPMGVVRPLTEVEMDHYREPFLNPVDREPLWRFPNELPIAGEPANIVALVEEYMDWLHQSPVPKLLFWGTPGVLIPPAEAARLAKSLPNCKAVDIGPGLNLLQEDNPDRIGSEIARWLSTLEISG

SEQ ID NO: 2737 - protein, 277 aa, Synthetic construct
MFHYVDVGPRDGTPVLFLHGNPTSSYVWRNIIPHVAPTHRCIAPDLIGMGKSDKPDLGYFFDDHVRFMDAFIEALGLEEVVLVIHDWGSALGFHWAKRNPERVKGIAFMEFIRPIPTWDEWPEFARETFQAFRTTDVGRKLIIDQNVFIEGTLPMGVVRPLTEVEMDHYREPFLNPVDREPLWRFPNELPIAGEPANIVALVEEYMDWLHQSPVPKLLFWGTPGVLIPPAEAARLAKSLPNCKAVDIGPGLNLLQEDNPDQIGSEIARWLSTLEISG

SEQ ID NO: 2738 - protein, 277 aa, Synthetic construct
MFHYVDVGPRDGTPVLFLHGNPTSSYVWRNIIPHVAPTHRCIAPDLIGMGKSDKPDLGYFFDDHVRFMDAFIEALGLEEVVLVIHDWGSALGFHWAKRNPERVKGIAFMEFIRPIPTWDEWPEFARETFQAFRTTDVGRKLIIDQNVFIEGTLPMGVVRPLTEVEMDHYREPFLNPVDREPLWRFPNELPIAGEPANIVALVEEYMDWLHQSPVPKLLFWGTPGVLIPPAEAARLAKSLPNCKAVDIGPGLNLLQEDNPDTIGSEIARWLSTLEISG

SEQ ID NO: 2739 - protein, 277 aa, Synthetic construct
MFHYVDVGPRDGTPVLFLHGNPTSSYVWRNIIPHVAPTHRCIAPDLIGMGKSDKPDLGYFFDDHVRFMDAFIEALGLEEVVLVIHDWGSALGFHWAKRNPERVKGIAFMEFIRPIPTWDEWPEFARETFQAFRTTDVGRKLIIDQNVFIEGTLPMGVVRPLTEVEMDHYREPFLNPVDREPLWRFPNELPIAGEPANIVALVEEYMDWLHQSPVPKLLFWGTPGVLIPPAEAARLAKSLPNCKAVDIGPGLNLLQEDNPDLVGSEIARWLSTLEISG

SEQ ID NO: 2740 - protein, 277 aa, Synthetic construct
MFHYVDVGPRDGTPVLFLHGNPTSSYVWRNIIPHVAPTHRCIAPDLIGMGKSDKPDLGYFFDDHVRFMDAFIEALGLEEVVLVIHDWGSALGFHWAKRNPERVKGIAFMEFIRPIPTWDEWPEFARETFQAFRTTDVGRKLIIDQNVFIEGTLPMGVVRPLTEVEMDHYREPFLNPVDREPLWRFPNELPIAGEPANIVALVEEYMDWLHQSPVPKLLFWGTPGVLIPPAEAARLAKSLPNCKAVDIGPGLNLLQEDNPDLLGSEIARWLSTLEISG

SEQ ID NO: 2741 - protein, 277 aa, Synthetic construct
MFHYVDVGPRDGTPVLFLHGNPTSSYVWRNIIPHVAPTHRCIAPDLIGMGKSDKPDLGYFFDDHVRFMDAFIEALGLEEVVLVIHDWGSALGFHWAKRNPERVKGIAFMEFIRPIPTWDEWPEFARETFQAFRTTDVGRKLIIDQNVFIEGTLPMGVVRPLTEVEMDHYREPFLNPVDREPLWRFPNELPIAGEPANIVALVEEYMDWLHQSPVPKLLFWGTPGVLIPPAEAARLAKSLPNCKAVDIGPGLNLLQEDNPDLMGSEIARWLSTLEISG

SEQ ID NO: 2742 - protein, 277 aa, Synthetic construct
MFHYVDVGPRDGTPVLFLHGNPTSSYVWRNIIPHVAPTHRCIAPDLIGMGKSDKPDLGYFFDDHVRFMDAFIEALGLEEVVLVIHDWGSALGFHWAKRNPERVKGIAFMEFIRPIPTWDEWPEFARETFQAFRTTDVGRKLIIDQNVFIEGTLPMGVVRPLTEVEMDHYREPFLNPVDREPLWRFPNELPIAGEPANIVALVEEYMDWLHQSPVPKLLFWGTPGVLIPPAEAARLAKSLPNCKAVDIGPGLNLLQEDNPDLAGSEIARWLSTLEISG

SEQ ID NO: 2743 - protein, 277 aa, Synthetic construct
MFHYVDVGPRDGTPVLFLHGNPTSSYVWRNIIPHVAPTHRCIAPDLIGMGKSDKPDLGYFFDDHVRFMDAFIEALGLEEVVLVIHDWGSALGFHWAKRNPERVKGIAFMEFIRPIPTWDEWPEFARETFQAFRTTDVGRKLIIDQNVFIEGTLPMGVVRPLTEVEMDHYREPFLNPVDREPLWRFPNELPIAGEPANIVALVEEYMDWLHQSPVPKLLFWGTPGVLIPPAEAARLAKSLPNCKAVDIGPGLNLLQEDNPDLTGSEIARWLSTLEISG

SEQ ID NO: 2744 - protein, 277 aa, Synthetic construct
MFHYVDVGPRDGTPVLFLHGNPTSSYVWRNIIPHVAPTHRCIAPDLIGMGKSDKPDLGYFFDDHVRFMDAFIEALGLEEVVLVIHDWGSALGFHWAKRNPERVKGIAFMEFIRPIPTWDEWPEFARETFQAFRTTDVGRKLIIDQNVFIEGTLPMGVVRPLTEVEMDHYREPFLNPVDREPLWRFPNELPIAGEPANIVALVEEYMDWLHQSPVPKLLFWGTPGVLIPPAEAARLAKSLPNCKAVDIGPGLNLLQEDNPDLFGSEIARWLSTLEISG

SEQ ID NO: 2745 - protein, 277 aa, Synthetic construct
MFHYVDVGPRDGTPVLFLHGNPTSSYVWRNIIPHVAPTHRCIAPDLIGMGKSDKPDLGYFFDDHVRFMDAFIEALGLEEVVLVIHDWGSALGFHWAKRNPERVKGIAFMEFIRPIPTWDEWPEFARETFQAFRTTDVGRKLIIDQNVFIEGTLPMGVVRPLTEVEMDHYREPFLNPVDREPLWRFPNELPIAGEPANIVALVEEYMDWLHQSPVPKLLFWGTPGVLIPPAEAARLAKSLPNCKAVDIGPGLNLLQEDNPDLIASEIARWLSTLEISG

SEQ ID NO: 2746 - protein, 277 aa, Synthetic construct
MFHYVDVGPRDGTPVLFLHGNPTSSYVWRNIIPHVAPTHRCIAPDLIGMGKSDKPDLGYFFDDHVRFMDAFIEALGLEEVVLVIHDWGSALGFHWAKRNPERVKGIAFMEFIRPIPTWDEWPEFARETFQAFRTTDVGRKLIIDQNVFIEGTLPMGVVRPLTEVEMDHYREPFLNPVDREPLWRFPNELPIAGEPANIVALVEEYMDWLHQSPVPKLLFWGTPGVLIPPAEAARLAKSLPNCKAVDIGPGLNLLQEDNPDLISSEIARWLSTLEISG

SEQ ID NO: 2747 - protein, 277 aa, Synthetic construct
MFHYVDVGPRDGTPVLFLHGNPTSSYVWRNIIPHVAPTHRCIAPDLIGMGKSDKPDLGYFFDDHVRFMDAFIEALGLEEVVLVIHDWGSALGFHWAKRNPERVKGIAFMEFIRPIPTWDEWPEFARETFQAFRTTDVGRKLIIDQNVFIEGTLPMGVVRPLTEVEMDHYREPFLNPVDREPLWRFPNELPIAGEPANIVALVEEYMDWLHQSPVPKLLFWGTPGVLIPPAEAARLAKSLPNCKAVDIGPGLNLLQEDNPDLITSEIARWLSTLEISG

SEQ ID NO: 2748 - protein, 277 aa, Synthetic construct
MFHYVDVGPRDGTPVLFLHGNPTSSYVWRNIIPHVAPTHRCIAPDLIGMGKSDKPDLGYFFDDHVRFMDAFIEALGLEEVVLVIHDWGSALGFHWAKRNPERVKGIAFMEFIRPIPTWDEWPEFARETFQAFRTTDVGRKLIIDQNVFIEGTLPMGVVRPLTEVEMDHYREPFLNPVDREPLWRFPNELPIAGEPANIVALVEEYMDWLHQSPVPKLLFWGTPGVLIPPAEAARLAKSLPNCKAVDIGPGLNLLQEDNPDLIVSEIARWLSTLEISG

SEQ ID NO: 2749 - protein, 277 aa, Synthetic construct
MFHYVDVGPRDGTPVLFLHGNPTSSYVWRNIIPHVAPTHRCIAPDLIGMGKSDKPDLGYFFDDHVRFMDAFIEALGLEEVVLVIHDWGSALGFHWAKRNPERVKGIAFMEFIRPIPTWDEWPEFARETFQAFRTTDVGRKLIIDQNVFIEGTLPMGVVRPLTEVEMDHYREPFLNPVDREPLWRFPNELPIAGEPANIVALVEEYMDWLHQSPVPKLLFWGTPGVLIPPAEAARLAKSLPNCKAVDIGPGLNLLQEDNPDLICSEIARWLSTLEISG

SEQ ID NO: 2750 - protein, 277 aa, Synthetic construct
MFHYVDVGPRDGTPVLFLHGNPTSSYVWRNIIPHVAPTHRCIAPDLIGMGKSDKPDLGYFFDDHVRFMDAFIEALGLEEVVLVIHDWGSALGFHWAKRNPERVKGIAFMEFIRPIPTWDEWPEFARETFQAFRTTDVGRKLIIDQNVFIEGTLPMGVVRPLTEVEMDHYREPFLNPVDREPLWRFPNELPIAGEPANIVALVEEYMDWLHQSPVPKLLFWGTPGVLIPPAEAARLAKSLPNCKAVDIGPGLNLLQEDNPDLIRSEIARWLSTLEISG

SEQ ID NO: 2751 - protein, 277 aa, Synthetic construct
MFHYVDVGPRDGTPVLFLHGNPTSSYVWRNIIPHVAPTHRCIAPDLIGMGKSDKPDLGYFFDDHVRFMDAFIEALGLEEVVLVIHDWGSALGFHWAKRNPERVKGIAFMEFIRPIPTWDEWPEFARETFQAFRTTDVGRKLIIDQNVFIEGTLPMGVVRPLTEVEMDHYREPFLNPVDREPLWRFPNELPIAGEPANIVALVEEYMDWLHQSPVPKLLFWGTPGVLIPPAEAARLAKSLPNCKAVDIGPGLNLLQEDNPDLIGAEIARWLSTLEISG

SEQ ID NO: 2752 - protein, 277 aa, Synthetic construct
MFHYVDVGPRDGTPVLFLHGNPTSSYVWRNIIPHVAPTHRCIAPDLIGMGKSDKPDLGYFFDDHVRFMDAFIEALGLEEVVLVIHDWGSALGFHWAKRNPERVKGIAFMEFIRPIPTWDEWPEFARETFQAFRTTDVGRKLIIDQNVFIEGTLPMGVVRPLTEVEMDHYREPFLNPVDREPLWRFPNELPIAGEPANIVALVEEYMDWLHQSPVPKLLFWGTPGVLIPPAEAARLAKSLPNCKAVDIGPGLNLLQEDNPDLIGREIARWLSTLEISG

SEQ ID NO: 2753 - protein, 277 aa, Synthetic construct
MFHYVDVGPRDGTPVLFLHGNPTSSYVWRNIIPHVAPTHRCIAPDLIGMGKSDKPDLGYFFDDHVRFMDAFIEALGLEEVVLVIHDWGSALGFHWAKRNPERVKGIAFMEFIRPIPTWDEWPEFARETFQAFRTTDVGRKLIIDQNVFIEGTLPMGVVRPLTEVEMDHYREPFLNPVDREPLWRFPNELPIAGEPANIVALVEEYMDWLHQSPVPKLLFWGTPGVLIPPAEAARLAKSLPNCKAVDIGPGLNLLQEDNPDLIGEEIARWLSTLEISG

SEQ ID NO: 2754 - protein, 277 aa, Synthetic construct
MFHYVDVGPRDGTPVLFLHGNPTSSYVWRNIIPHVAPTHRCIAPDLIGMGKSDKPDLGYFFDDHVRFMDAFIEALGLEEVVLVIHDWGSALGFHWAKRNPERVKGIAFMEFIRPIPTWDEWPEFARETFQAFRTTDVGRKLIIDQNVFIEGTLPMGVVRPLTEVEMDHYREPFLNPVDREPLWRFPNELPIAGEPANIVALVEEYMDWLHQSPVPKLLFWGTPGVLIPPAEAARLAKSLPNCKAVDIGPGLNLLQEDNPDLIGQEIARWLSTLEISG

SEQ ID NO: 2755 - protein, 277 aa, Synthetic construct
MFHYVDVGPRDGTPVLFLHGNPTSSYVWRNIIPHVAPTHRCIAPDLIGMGKSDKPDLGYFFDDHVRFMDAFIEALGLEEVVLVIHDWGSALGFHWAKRNPERVKGIAFMEFIRPIPTWDEWPEFARETFQAFRTTDVGRKLIIDQNVFIEGTLPMGVVRPLTEVEMDHYREPFLNPVDREPLWRFPNELPIAGEPANIVALVEEYMDWLHQSPVPKLLFWGTPGVLIPPAEAARLAKSLPNCKAVDIGPGLNLLQEDNPDLIGKEIARWLSTLEISG

SEQ ID NO: 2756 - protein, 277 aa, Synthetic construct
MFHYVDVGPRDGTPVLFLHGNPTSSYVWRNIIPHVAPTHRCIAPDLIGMGKSDKPDLGYFFDDHVRFMDAFIEALGLEEVVLVIHDWGSALGFHWAKRNPERVKGIAFMEFIRPIPTWDEWPEFARETFQAFRTTDVGRKLIIDQNVFIEGTLPMGVVRPLTEVEMDHYREPFLNPVDREPLWRFPNELPIAGEPANIVALVEEYMDWLHQSPVPKLLFWGTPGVLIPPAEAARLAKSLPNCKAVDIGPGLNLLQEDNPDLIGTEIARWLSTLEISG

SEQ ID NO: 2757 - protein, 277 aa, Synthetic construct
MFHYVDVGPRDGTPVLFLHGNPTSSYVWRNIIPHVAPTHRCIAPDLIGMGKSDKPDLGYFFDDHVRFMDAFIEALGLEEVVLVIHDWGSALGFHWAKRNPERVKGIAFMEFIRPIPTWDEWPEFARETFQAFRTTDVGRKLIIDQNVFIEGTLPMGVVRPLTEVEMDHYREPFLNPVDREPLWRFPNELPIAGEPANIVALVEEYMDWLHQSPVPKLLFWGTPGVLIPPAEAARLAKSLPNCKAVDIGPGLNLLQEDNPDLIGSAIARWLSTLEISG

SEQ ID NO: 2758 - protein, 277 aa, Synthetic construct
MFHYVDVGPRDGTPVLFLHGNPTSSYVWRNIIPHVAPTHRCIAPDLIGMGKSDKPDLGYFFDDHVRFMDAFIEALGLEEVVLVIHDWGSALGFHWAKRNPERVKGIAFMEFIRPIPTWDEWPEFARETFQAFRTTDVGRKLIIDQNVFIEGTLPMGVVRPLTEVEMDHYREPFLNPVDREPLWRFPNELPIAGEPANIVALVEEYMDWLHQSPVPKLLFWGTPGVLIPPAEAARLAKSLPNCKAVDIGPGLNLLQEDNPDLIGSTIARWLSTLEISG

SEQ ID NO: 2759 - protein, 277 aa, Synthetic construct
MFHYVDVGPRDGTPVLFLHGNPTSSYVWRNIIPHVAPTHRCIAPDLIGMGKSDKPDLGYFFDDHVRFMDAFIEALGLEEVVLVIHDWGSALGFHWAKRNPERVKGIAFMEFIRPIPTWDEWPEFARETFQAFRTTDVGRKLIIDQNVFIEGTLPMGVVRPLTEVEMDHYREPFLNPVDREPLWRFPNELPIAGEPANIVALVEEYMDWLHQSPVPKLLFWGTPGVLIPPAEAARLAKSLPNCKAVDIGPGLNLLQEDNPDLIGSHIARWLSTLEISG

SEQ ID NO: 2760 - protein, 277 aa, Synthetic construct
MFHYVDVGPRDGTPVLFLHGNPTSSYVWRNIIPHVAPTHRCIAPDLIGMGKSDKPDLGYFFDDHVRFMDAFIEALGLEEVVLVIHDWGSALGFHWAKRNPERVKGIAFMEFIRPIPTWDEWPEFARETFQAFRTTDVGRKLIIDQNVFIEGTLPMGVVRPLTEVEMDHYREPFLNPVDREPLWRFPNELPIAGEPANIVALVEEYMDWLHQSPVPKLLFWGTPGVLIPPAEAARLAKSLPNCKAVDIGPGLNLLQEDNPDLIGSSIARWLSTLEISG

SEQ ID NO: 2761 - protein, 277 aa, Synthetic construct
MFHYVDVGPRDGTPVLFLHGNPTSSYVWRNIIPHVAPTHRCIAPDLIGMGKSDKPDLGYFFDDHVRFMDAFIEALGLEEVVLVIHDWGSALGFHWAKRNPERVKGIAFMEFIRPIPTWDEWPEFARETFQAFRTTDVGRKLIIDQNVFIEGTLPMGVVRPLTEVEMDHYREPFLNPVDREPLWRFPNELPIAGEPANIVALVEEYMDWLHQSPVPKLLFWGTPGVLIPPAEAARLAKSLPNCKAVDIGPGLNLLQEDNPDLIGSQIARWLSTLEISG

SEQ ID NO: 2762 - protein, 277 aa, Synthetic construct
MFHYVDVGPRDGTPVLFLHGNPTSSYVWRNIIPHVAPTHRCIAPDLIGMGKSDKPDLGYFFDDHVRFMDAFIEALGLEEVVLVIHDWGSALGFHWAKRNPERVKGIAFMEFIRPIPTWDEWPEFARETFQAFRTTDVGRKLIIDQNVFIEGTLPMGVVRPLTEVEMDHYREPFLNPVDREPLWRFPNELPIAGEPANIVALVEEYMDWLHQSPVPKLLFWGTPGVLIPPAEAARLAKSLPNCKAVDIGPGLNLLQEDNPDLIGSVIARWLSTLEISG

SEQ ID NO: 2763 - protein, 277 aa, Synthetic construct
MFHYVDVGPRDGTPVLFLHGNPTSSYVWRNIIPHVAPTHRCIAPDLIGMGKSDKPDLGYFFDDHVRFMDAFIEALGLEEVVLVIHDWGSALGFHWAKRNPERVKGIAFMEFIRPIPTWDEWPEFARETFQAFRTTDVGRKLIIDQNVFIEGTLPMGVVRPLTEVEMDHYREPFLNPVDREPLWRFPNELPIAGEPANIVALVEEYMDWLHQSPVPKLLFWGTPGVLIPPAEAARLAKSLPNCKAVDIGPGLNLLQEDNPDLIGSELARWLSTLEISG

SEQ ID NO: 2764 - protein, 277 aa, Synthetic construct
MFHYVDVGPRDGTPVLFLHGNPTSSYVWRNIIPHVAPTHRCIAPDLIGMGKSDKPDLGYFFDDHVRFMDAFIEALGLEEVVLVIHDWGSALGFHWAKRNPERVKGIAFMEFIRPIPTWDEWPEFARETFQAFRTTDVGRKLIIDQNVFIEGTLPMGVVRPLTEVEMDHYREPFLNPVDREPLWRFPNELPIAGEPANIVALVEEYMDWLHQSPVPKLLFWGTPGVLIPPAEAARLAKSLPNCKAVDIGPGLNLLQEDNPDLIGSEVARWLSTLEISG

SEQ ID NO: 2765 - protein, 277 aa, Synthetic construct
MFHYVDVGPRDGTPVLFLHGNPTSSYVWRNIIPHVAPTHRCIAPDLIGMGKSDKPDLGYFFDDHVRFMDAFIEALGLEEVVLVIHDWGSALGFHWAKRNPERVKGIAFMEFIRPIPTWDEWPEFARETFQAFRTTDVGRKLIIDQNVFIEGTLPMGVVRPLTEVEMDHYREPFLNPVDREPLWRFPNELPIAGEPANIVALVEEYMDWLHQSPVPKLLFWGTPGVLIPPAEAARLAKSLPNCKAVDIGPGLNLLQEDNPDLIGSEMARWLSTLEISG

SEQ ID NO: 2766 - protein, 277 aa, Synthetic construct
MFHYVDVGPRDGTPVLFLHGNPTSSYVWRNIIPHVAPTHRCIAPDLIGMGKSDKPDLGYFFDDHVRFMDAFIEALGLEEVVLVIHDWGSALGFHWAKRNPERVKGIAFMEFIRPIPTWDEWPEFARETFQAFRTTDVGRKLIIDQNVFIEGTLPMGVVRPLTEVEMDHYREPFLNPVDREPLWRFPNELPIAGEPANIVALVEEYMDWLHQSPVPKLLFWGTPGVLIPPAEAARLAKSLPNCKAVDIGPGLNLLQEDNPDLIGSEFARWLSTLEISG

SEQ ID NO: 2767 - protein, 277 aa, Synthetic construct
MFHYVDVGPRDGTPVLFLHGNPTSSYVWRNIIPHVAPTHRCIAPDLIGMGKSDKPDLGYFFDDHVRFMDAFIEALGLEEVVLVIHDWGSALGFHWAKRNPERVKGIAFMEFIRPIPTWDEWPEFARETFQAFRTTDVGRKLIIDQNVFIEGTLPMGVVRPLTEVEMDHYREPFLNPVDREPLWRFPNELPIAGEPANIVALVEEYMDWLHQSPVPKLLFWGTPGVLIPPAEAARLAKSLPNCKAVDIGPGLNLLQEDNPDLIGSETARWLSTLEISG

SEQ ID NO: 2768 - protein, 277 aa, Synthetic construct
MFHYVDVGPRDGTPVLFLHGNPTSSYVWRNIIPHVAPTHRCIAPDLIGMGKSDKPDLGYFFDDHVRFMDAFIEALGLEEVVLVIHDWGSALGFHWAKRNPERVKGIAFMEFIRPIPTWDEWPEFARETFQAFRTTDVGRKLIIDQNVFIEGTLPMGVVRPLTEVEMDHYREPFLNPVDREPLWRFPNELPIAGEPANIVALVEEYMDWLHQSPVPKLLFWGTPGVLIPPAEAARLAKSLPNCKAVDIGPGLNLLQEDNPDLIGSEAARWLSTLEISG

SEQ ID NO: 2769 - protein, 277 aa, Synthetic construct
MFHYVDVGPRDGTPVLFLHGNPTSSYVWRNIIPHVAPTHRCIAPDLIGMGKSDKPDLGYFFDDHVRFMDAFIEALGLEEVVLVIHDWGSALGFHWAKRNPERVKGIAFMEFIRPIPTWDEWPEFARETFQAFRTTDVGRKLIIDQNVFIEGTLPMGVVRPLTEVEMDHYREPFLNPVDREPLWRFPNELPIAGEPANIVALVEEYMDWLHQSPVPKLLFWGTPGVLIPPAEAARLAKSLPNCKAVDIGPGLNLLQEDNPDLIGSEISRWLSTLEISG

SEQ ID NO: 2770 - protein, 277 aa, Synthetic construct
MFHYVDVGPRDGTPVLFLHGNPTSSYVWRNIIPHVAPTHRCIAPDLIGMGKSDKPDLGYFFDDHVRFMDAFIEALGLEEVVLVIHDWGSALGFHWAKRNPERVKGIAFMEFIRPIPTWDEWPEFARETFQAFRTTDVGRKLIIDQNVFIEGTLPMGVVRPLTEVEMDHYREPFLNPVDREPLWRFPNELPIAGEPANIVALVEEYMDWLHQSPVPKLLFWGTPGVLIPPAEAARLAKSLPNCKAVDIGPGLNLLQEDNPDLIGSEIGRWLSTLEISG

SEQ ID NO: 2771 - protein, 277 aa, Synthetic construct
MFHYVDVGPRDGTPVLFLHGNPTSSYVWRNIIPHVAPTHRCIAPDLIGMGKSDKPDLGYFFDDHVRFMDAFIEALGLEEVVLVIHDWGSALGFHWAKRNPERVKGIAFMEFIRPIPTWDEWPEFARETFQAFRTTDVGRKLIIDQNVFIEGTLPMGVVRPLTEVEMDHYREPFLNPVDREPLWRFPNELPIAGEPANIVALVEEYMDWLHQSPVPKLLFWGTPGVLIPPAEAARLAKSLPNCKAVDIGPGLNLLQEDNPDLIGSEITRWLSTLEISG

SEQ ID NO: 2772 - protein, 277 aa, Synthetic construct
MFHYVDVGPRDGTPVLFLHGNPTSSYVWRNIIPHVAPTHRCIAPDLIGMGKSDKPDLGYFFDDHVRFMDAFIEALGLEEVVLVIHDWGSALGFHWAKRNPERVKGIAFMEFIRPIPTWDEWPEFARETFQAFRTTDVGRKLIIDQNVFIEGTLPMGVVRPLTEVEMDHYREPFLNPVDREPLWRFPNELPIAGEPANIVALVEEYMDWLHQSPVPKLLFWGTPGVLIPPAEAARLAKSLPNCKAVDIGPGLNLLQEDNPDLIGSEINRWLSTLEISG

SEQ ID NO: 2773 - protein, 277 aa, Synthetic construct
MFHYVDVGPRDGTPVLFLHGNPTSSYVWRNIIPHVAPTHRCIAPDLIGMGKSDKPDLGYFFDDHVRFMDAFIEALGLEEVVLVIHDWGSALGFHWAKRNPERVKGIAFMEFIRPIPTWDEWPEFARETFQAFRTTDVGRKLIIDQNVFIEGTLPMGVVRPLTEVEMDHYREPFLNPVDREPLWRFPNELPIAGEPANIVALVEEYMDWLHQSPVPKLLFWGTPGVLIPPAEAARLAKSLPNCKAVDIGPGLNLLQEDNPDLIGSEIRRWLSTLEISG

SEQ ID NO: 2774 - protein, 277 aa, Synthetic construct
MFHYVDVGPRDGTPVLFLHGNPTSSYVWRNIIPHVAPTHRCIAPDLIGMGKSDKPDLGYFFDDHVRFMDAFIEALGLEEVVLVIHDWGSALGFHWAKRNPERVKGIAFMEFIRPIPTWDEWPEFARETFQAFRTTDVGRKLIIDQNVFIEGTLPMGVVRPLTEVEMDHYREPFLNPVDREPLWRFPNELPIAGEPANIVALVEEYMDWLHQSPVPKLLFWGTPGVLIPPAEAARLAKSLPNCKAVDIGPGLNLLQEDNPDLIGSEIVRWLSTLEISG

SEQ ID NO: 2775 - protein, 277 aa, Synthetic construct
MFHYVDVGPRDGTPVLFLHGNPTSSYVWRNIIPHVAPTHRCIAPDLIGMGKSDKPDLGYFFDDHVRFMDAFIEALGLEEVVLVIHDWGSALGFHWAKRNPERVKGIAFMEFIRPIPTWDEWPEFARETFQAFRTTDVGRKLIIDQNVFIEGTLPMGVVRPLTEVEMDHYREPFLNPVDREPLWRFPNELPIAGEPANIVALVEEYMDWLHQSPVPKLLFWGTPGVLIPPAEAARLAKSLPNCKAVDIGPGLNLLQEDNPDLIGSEIAAWLSTLEISG

SEQ ID NO: 2776 - protein, 277 aa, Synthetic construct
MFHYVDVGPRDGTPVLFLHGNPTSSYVWRNIIPHVAPTHRCIAPDLIGMGKSDKPDLGYFFDDHVRFMDAFIEALGLEEVVLVIHDWGSALGFHWAKRNPERVKGIAFMEFIRPIPTWDEWPEFARETFQAFRTTDVGRKLIIDQNVFIEGTLPMGVVRPLTEVEMDHYREPFLNPVDREPLWRFPNELPIAGEPANIVALVEEYMDWLHQSPVPKLLFWGTPGVLIPPAEAARLAKSLPNCKAVDIGPGLNLLQEDNPDLIGSEIADWLSTLEISG

SEQ ID NO: 2777 - protein, 277 aa, Synthetic construct
MFHYVDVGPRDGTPVLFLHGNPTSSYVWRNIIPHVAPTHRCIAPDLIGMGKSDKPDLGYFFDDHVRFMDAFIEALGLEEVVLVIHDWGSALGFHWAKRNPERVKGIAFMEFIRPIPTWDEWPEFARETFQAFRTTDVGRKLIIDQNVFIEGTLPMGVVRPLTEVEMDHYREPFLNPVDREPLWRFPNELPIAGEPANIVALVEEYMDWLHQSPVPKLLFWGTPGVLIPPAEAARLAKSLPNCKAVDIGPGLNLLQEDNPDLIGSEIASWLSTLEISG

SEQ ID NO: 2778 - protein, 277 aa, Synthetic construct
MFHYVDVGPRDGTPVLFLHGNPTSSYVWRNIIPHVAPTHRCIAPDLIGMGKSDKPDLGYFFDDHVRFMDAFIEALGLEEVVLVIHDWGSALGFHWAKRNPERVKGIAFMEFIRPIPTWDEWPEFARETFQAFRTTDVGRKLIIDQNVFIEGTLPMGVVRPLTEVEMDHYREPFLNPVDREPLWRFPNELPIAGEPANIVALVEEYMDWLHQSPVPKLLFWGTPGVLIPPAEAARLAKSLPNCKAVDIGPGLNLLQEDNPDLIGSEIAEWLSTLEISG

SEQ ID NO: 2779 - protein, 277 aa, Synthetic construct
MFHYVDVGPRDGTPVLFLHGNPTSSYVWRNIIPHVAPTHRCIAPDLIGMGKSDKPDLGYFFDDHVRFMDAFIEALGLEEVVLVIHDWGSALGFHWAKRNPERVKGIAFMEFIRPIPTWDEWPEFARETFQAFRTTDVGRKLIIDQNVFIEGTLPMGVVRPLTEVEMDHYREPFLNPVDREPLWRFPNELPIAGEPANIVALVEEYMDWLHQSPVPKLLFWGTPGVLIPPAEAARLAKSLPNCKAVDIGPGLNLLQEDNPDLIGSEIATWLSTLEISG

SEQ ID NO: 2780 - protein, 277 aa, Synthetic construct
MFHYVDVGPRDGTPVLFLHGNPTSSYVWRNIIPHVAPTHRCIAPDLIGMGKSDKPDLGYFFDDHVRFMDAFIEALGLEEVVLVIHDWGSALGFHWAKRNPERVKGIAFMEFIRPIPTWDEWPEFARETFQAFRTTDVGRKLIIDQNVFIEGTLPMGVVRPLTEVEMDHYREPFLNPVDREPLWRFPNELPIAGEPANIVALVEEYMDWLHQSPVPKLLFWGTPGVLIPPAEAARLAKSLPNCKAVDIGPGLNLLQEDNPDLIGSEIAGWLSTLEISG

SEQ ID NO: 2781 - protein, 277 aa, Synthetic construct
MFHYVDVGPRDGTPVLFLHGNPTSSYVWRNIIPHVAPTHRCIAPDLIGMGKSDKPDLGYFFDDHVRFMDAFIEALGLEEVVLVIHDWGSALGFHWAKRNPERVKGIAFMEFIRPIPTWDEWPEFARETFQAFRTTDVGRKLIIDQNVFIEGTLPMGVVRPLTEVEMDHYREPFLNPVDREPLWRFPNELPIAGEPANIVALVEEYMDWLHQSPVPKLLFWGTPGVLIPPAEAARLAKSLPNCKAVDIGPGLNLLQEDNPDLIGSEIARFLSTLEISG

SEQ ID NO: 2782 - protein, 277 aa, Synthetic construct
MFHYVDVGPRDGTPVLFLHGNPTSSYVWRNIIPHVAPTHRCIAPDLIGMGKSDKPDLGYFFDDHVRFMDAFIEALGLEEVVLVIHDWGSALGFHWAKRNPERVKGIAFMEFIRPIPTWDEWPEFARETFQAFRTTDVGRKLIIDQNVFIEGTLPMGVVRPLTEVEMDHYREPFLNPVDREPLWRFPNELPIAGEPANIVALVEEYMDWLHQSPVPKLLFWGTPGVLIPPAEAARLAKSLPNCKAVDIGPGLNLLQEDNPDLIGSEIARYLSTLEISG

SEQ ID NO: 2783 - protein, 277 aa, Synthetic construct
MFHYVDVGPRDGTPVLFLHGNPTSSYVWRNIIPHVAPTHRCIAPDLIGMGKSDKPDLGYFFDDHVRFMDAFIEALGLEEVVLVIHDWGSALGFHWAKRNPERVKGIAFMEFIRPIPTWDEWPEFARETFQAFRTTDVGRKLIIDQNVFIEGTLPMGVVRPLTEVEMDHYREPFLNPVDREPLWRFPNELPIAGEPANIVALVEEYMDWLHQSPVPKLLFWGTPGVLIPPAEAARLAKSLPNCKAVDIGPGLNLLQEDNPDLIGSEIARLLSTLEISG

SEQ ID NO: 2784 - protein, 277 aa, Synthetic construct
MFHYVDVGPRDGTPVLFLHGNPTSSYVWRNIIPHVAPTHRCIAPDLIGMGKSDKPDLGYFFDDHVRFMDAFIEALGLEEVVLVIHDWGSALGFHWAKRNPERVKGIAFMEFIRPIPTWDEWPEFARETFQAFRTTDVGRKLIIDQNVFIEGTLPMGVVRPLTEVEMDHYREPFLNPVDREPLWRFPNELPIAGEPANIVALVEEYMDWLHQSPVPKLLFWGTPGVLIPPAEAARLAKSLPNCKAVDIGPGLNLLQEDNPDLIGSEIARHLSTLEISG

SEQ ID NO: 2785 - protein, 277 aa, Synthetic construct
MFHYVDVGPRDGTPVLFLHGNPTSSYVWRNIIPHVAPTHRCIAPDLIGMGKSDKPDLGYFFDDHVRFMDAFIEALGLEEVVLVIHDWGSALGFHWAKRNPERVKGIAFMEFIRPIPTWDEWPEFARETFQAFRTTDVGRKLIIDQNVFIEGTLPMGVVRPLTEVEMDHYREPFLNPVDREPLWRFPNELPIAGEPANIVALVEEYMDWLHQSPVPKLLFWGTPGVLIPPAEAARLAKSLPNCKAVDIGPGLNLLQEDNPDLIGSEIARVLSTLEISG

SEQ ID NO: 2786 - protein, 277 aa, Synthetic construct
MFHYVDVGPRDGTPVLFLHGNPTSSYVWRNIIPHVAPTHRCIAPDLIGMGKSDKPDLGYFFDDHVRFMDAFIEALGLEEVVLVIHDWGSALGFHWAKRNPERVKGIAFMEFIRPIPTWDEWPEFARETFQAFRTTDVGRKLIIDQNVFIEGTLPMGVVRPLTEVEMDHYREPFLNPVDREPLWRFPNELPIAGEPANIVALVEEYMDWLHQSPVPKLLFWGTPGVLIPPAEAARLAKSLPNCKAVDIGPGLNLLQEDNPDLIGSEIARMLSTLEISG

SEQ ID NO: 2787 - protein, 277 aa, Synthetic construct
MFHYVDVGPRDGTPVLFLHGNPTSSYVWRNIIPHVAPTHRCIAPDLIGMGKSDKPDLGYFFDDHVRFMDAFIEALGLEEVVLVIHDWGSALGFHWAKRNPERVKGIAFMEFIRPIPTWDEWPEFARETFQAFRTTDVGRKLIIDQNVFIEGTLPMGVVRPLTEVEMDHYREPFLNPVDREPLWRFPNELPIAGEPANIVALVEEYMDWLHQSPVPKLLFWGTPGVLIPPAEAARLAKSLPNCKAVDIGPGLNLLQEDNPDLIGSEIARWISTLEISG

SEQ ID NO: 2788 - protein, 277 aa, Synthetic construct
MFHYVDVGPRDGTPVLFLHGNPTSSYVWRNIIPHVAPTHRCIAPDLIGMGKSDKPDLGYFFDDHVRFMDAFIEALGLEEVVLVIHDWGSALGFHWAKRNPERVKGIAFMEFIRPIPTWDEWPEFARETFQAFRTTDVGRKLIIDQNVFIEGTLPMGVVRPLTEVEMDHYREPFLNPVDREPLWRFPNELPIAGEPANIVALVEEYMDWLHQSPVPKLLFWGTPGVLIPPAEAARLAKSLPNCKAVDIGPGLNLLQEDNPDLIGSEIARWVSTLEISG

SEQ ID NO: 2789 - protein, 277 aa, Synthetic construct
MFHYVDVGPRDGTPVLFLHGNPTSSYVWRNIIPHVAPTHRCIAPDLIGMGKSDKPDLGYFFDDHVRFMDAFIEALGLEEVVLVIHDWGSALGFHWAKRNPERVKGIAFMEFIRPIPTWDEWPEFARETFQAFRTTDVGRKLIIDQNVFIEGTLPMGVVRPLTEVEMDHYREPFLNPVDREPLWRFPNELPIAGEPANIVALVEEYMDWLHQSPVPKLLFWGTPGVLIPPAEAARLAKSLPNCKAVDIGPGLNLLQEDNPDLIGSEIARWFSTLEISG

SEQ ID NO: 2790 - protein, 277 aa, Synthetic construct
MFHYVDVGPRDGTPVLFLHGNPTSSYVWRNIIPHVAPTHRCIAPDLIGMGKSDKPDLGYFFDDHVRFMDAFIEALGLEEVVLVIHDWGSALGFHWAKRNPERVKGIAFMEFIRPIPTWDEWPEFARETFQAFRTTDVGRKLIIDQNVFIEGTLPMGVVRPLTEVEMDHYREPFLNPVDREPLWRFPNELPIAGEPANIVALVEEYMDWLHQSPVPKLLFWGTPGVLIPPAEAARLAKSLPNCKAVDIGPGLNLLQEDNPDLIGSEIARWMSTLEISG

SEQ ID NO: 2791 - protein, 277 aa, Synthetic construct
MFHYVDVGPRDGTPVLFLHGNPTSSYVWRNIIPHVAPTHRCIAPDLIGMGKSDKPDLGYFFDDHVRFMDAFIEALGLEEVVLVIHDWGSALGFHWAKRNPERVKGIAFMEFIRPIPTWDEWPEFARETFQAFRTTDVGRKLIIDQNVFIEGTLPMGVVRPLTEVEMDHYREPFLNPVDREPLWRFPNELPIAGEPANIVALVEEYMDWLHQSPVPKLLFWGTPGVLIPPAEAARLAKSLPNCKAVDIGPGLNLLQEDNPDLIGSEIARWASTLEISG

SEQ ID NO: 2792 - protein, 277 aa, Synthetic construct
MFHYVDVGPRDGTPVLFLHGNPTSSYVWRNIIPHVAPTHRCIAPDLIGMGKSDKPDLGYFFDDHVRFMDAFIEALGLEEVVLVIHDWGSALGFHWAKRNPERVKGIAFMEFIRPIPTWDEWPEFARETFQAFRTTDVGRKLIIDQNVFIEGTLPMGVVRPLTEVEMDHYREPFLNPVDREPLWRFPNELPIAGEPANIVALVEEYMDWLHQSPVPKLLFWGTPGVLIPPAEAARLAKSLPNCKAVDIGPGLNLLQEDNPDLIGSEIARWYSTLEISG

SEQ ID NO: 2793 - protein, 277 aa, Synthetic construct
MFHYVDVGPRDGTPVLFLHGNPTSSYVWRNIIPHVAPTHRCIAPDLIGMGKSDKPDLGYFFDDHVRFMDAFIEALGLEEVVLVIHDWGSALGFHWAKRNPERVKGIAFMEFIRPIPTWDEWPEFARETFQAFRTTDVGRKLIIDQNVFIEGTLPMGVVRPLTEVEMDHYREPFLNPVDREPLWRFPNELPIAGEPANIVALVEEYMDWLHQSPVPKLLFWGTPGVLIPPAEAARLAKSLPNCKAVDIGPGLNLLQEDNPDLIGSEIARWLATLEISG

SEQ ID NO: 2794 - protein, 277 aa, Synthetic construct
MFHYVDVGPRDGTPVLFLHGNPTSSYVWRNIIPHVAPTHRCIAPDLIGMGKSDKPDLGYFFDDHVRFMDAFIEALGLEEVVLVIHDWGSALGFHWAKRNPERVKGIAFMEFIRPIPTWDEWPEFARETFQAFRTTDVGRKLIIDQNVFIEGTLPMGVVRPLTEVEMDHYREPFLNPVDREPLWRFPNELPIAGEPANIVALVEEYMDWLHQSPVPKLLFWGTPGVLIPPAEAARLAKSLPNCKAVDIGPGLNLLQEDNPDLIGSEIARWLETLEISG

SEQ ID NO: 2795 - protein, 277 aa, Synthetic construct
MFHYVDVGPRDGTPVLFLHGNPTSSYVWRNIIPHVAPTHRCIAPDLIGMGKSDKPDLGYFFDDHVRFMDAFIEALGLEEVVLVIHDWGSALGFHWAKRNPERVKGIAFMEFIRPIPTWDEWPEFARETFQAFRTTDVGRKLIIDQNVFIEGTLPMGVVRPLTEVEMDHYREPFLNPVDREPLWRFPNELPIAGEPANIVALVEEYMDWLHQSPVPKLLFWGTPGVLIPPAEAARLAKSLPNCKAVDIGPGLNLLQEDNPDLIGSEIARWLGTLEISG

SEQ ID NO: 2796 - protein, 277 aa, Synthetic construct
MFHYVDVGPRDGTPVLFLHGNPTSSYVWRNIIPHVAPTHRCIAPDLIGMGKSDKPDLGYFFDDHVRFMDAFIEALGLEEVVLVIHDWGSALGFHWAKRNPERVKGIAFMEFIRPIPTWDEWPEFARETFQAFRTTDVGRKLIIDQNVFIEGTLPMGVVRPLTEVEMDHYREPFLNPVDREPLWRFPNELPIAGEPANIVALVEEYMDWLHQSPVPKLLFWGTPGVLIPPAEAARLAKSLPNCKAVDIGPGLNLLQEDNPDLIGSEIARWLDTLEISG

SEQ ID NO: 2797 - protein, 277 aa, Synthetic construct
MFHYVDVGPRDGTPVLFLHGNPTSSYVWRNIIPHVAPTHRCIAPDLIGMGKSDKPDLGYFFDDHVRFMDAFIEALGLEEVVLVIHDWGSALGFHWAKRNPERVKGIAFMEFIRPIPTWDEWPEFARETFQAFRTTDVGRKLIIDQNVFIEGTLPMGVVRPLTEVEMDHYREPFLNPVDREPLWRFPNELPIAGEPANIVALVEEYMDWLHQSPVPKLLFWGTPGVLIPPAEAARLAKSLPNCKAVDIGPGLNLLQEDNPDLIGSEIARWLKTLEISG

SEQ ID NO: 2798 - protein, 277 aa, Synthetic construct
MFHYVDVGPRDGTPVLFLHGNPTSSYVWRNIIPHVAPTHRCIAPDLIGMGKSDKPDLGYFFDDHVRFMDAFIEALGLEEVVLVIHDWGSALGFHWAKRNPERVKGIAFMEFIRPIPTWDEWPEFARETFQAFRTTDVGRKLIIDQNVFIEGTLPMGVVRPLTEVEMDHYREPFLNPVDREPLWRFPNELPIAGEPANIVALVEEYMDWLHQSPVPKLLFWGTPGVLIPPAEAARLAKSLPNCKAVDIGPGLNLLQEDNPDLIGSEIARWLRTLEISG

SEQ ID NO: 2799 - protein, 277 aa, Synthetic construct
MFHYVDVGPRDGTPVLFLHGNPTSSYVWRNIIPHVAPTHRCIAPDLIGMGKSDKPDLGYFFDDHVRFMDAFIEALGLEEVVLVIHDWGSALGFHWAKRNPERVKGIAFMEFIRPIPTWDEWPEFARETFQAFRTTDVGRKLIIDQNVFIEGTLPMGVVRPLTEVEMDHYREPFLNPVDREPLWRFPNELPIAGEPANIVALVEEYMDWLHQSPVPKLLFWGTPGVLIPPAEAARLAKSLPNCKAVDIGPGLNLLQEDNPDLIGSEIARWLSELEISG

SEQ ID NO: 2800 - protein, 277 aa, Synthetic construct
MFHYVDVGPRDGTPVLFLHGNPTSSYVWRNIIPHVAPTHRCIAPDLIGMGKSDKPDLGYFFDDHVRFMDAFIEALGLEEVVLVIHDWGSALGFHWAKRNPERVKGIAFMEFIRPIPTWDEWPEFARETFQAFRTTDVGRKLIIDQNVFIEGTLPMGVVRPLTEVEMDHYREPFLNPVDREPLWRFPNELPIAGEPANIVALVEEYMDWLHQSPVPKLLFWGTPGVLIPPAEAARLAKSLPNCKAVDIGPGLNLLQEDNPDLIGSEIARWLSSLEISG

SEQ ID NO: 2801 - protein, 277 aa, Synthetic construct
MFHYVDVGPRDGTPVLFLHGNPTSSYVWRNIIPHVAPTHRCIAPDLIGMGKSDKPDLGYFFDDHVRFMDAFIEALGLEEVVLVIHDWGSALGFHWAKRNPERVKGIAFMEFIRPIPTWDEWPEFARETFQAFRTTDVGRKLIIDQNVFIEGTLPMGVVRPLTEVEMDHYREPFLNPVDREPLWRFPNELPIAGEPANIVALVEEYMDWLHQSPVPKLLFWGTPGVLIPPAEAARLAKSLPNCKAVDIGPGLNLLQEDNPDLIGSEIARWLSGLEISG

SEQ ID NO: 2802 - protein, 277 aa, Synthetic construct
MFHYVDVGPRDGTPVLFLHGNPTSSYVWRNIIPHVAPTHRCIAPDLIGMGKSDKPDLGYFFDDHVRFMDAFIEALGLEEVVLVIHDWGSALGFHWAKRNPERVKGIAFMEFIRPIPTWDEWPEFARETFQAFRTTDVGRKLIIDQNVFIEGTLPMGVVRPLTEVEMDHYREPFLNPVDREPLWRFPNELPIAGEPANIVALVEEYMDWLHQSPVPKLLFWGTPGVLIPPAEAARLAKSLPNCKAVDIGPGLNLLQEDNPDLIGSEIARWLSDLEISG

SEQ ID NO: 2803 - protein, 277 aa, Synthetic construct
MFHYVDVGPRDGTPVLFLHGNPTSSYVWRNIIPHVAPTHRCIAPDLIGMGKSDKPDLGYFFDDHVRFMDAFIEALGLEEVVLVIHDWGSALGFHWAKRNPERVKGIAFMEFIRPIPTWDEWPEFARETFQAFRTTDVGRKLIIDQNVFIEGTLPMGVVRPLTEVEMDHYREPFLNPVDREPLWRFPNELPIAGEPANIVALVEEYMDWLHQSPVPKLLFWGTPGVLIPPAEAARLAKSLPNCKAVDIGPGLNLLQEDNPDLIGSEIARWLSALEISG

SEQ ID NO: 2804 - protein, 277 aa, Synthetic construct
MFHYVDVGPRDGTPVLFLHGNPTSSYVWRNIIPHVAPTHRCIAPDLIGMGKSDKPDLGYFFDDHVRFMDAFIEALGLEEVVLVIHDWGSALGFHWAKRNPERVKGIAFMEFIRPIPTWDEWPEFARETFQAFRTTDVGRKLIIDQNVFIEGTLPMGVVRPLTEVEMDHYREPFLNPVDREPLWRFPNELPIAGEPANIVALVEEYMDWLHQSPVPKLLFWGTPGVLIPPAEAARLAKSLPNCKAVDIGPGLNLLQEDNPDLIGSEIARWLSQLEISG

SEQ ID NO: 2805 - protein, 277 aa, Synthetic construct
MFHYVDVGPRDGTPVLFLHGNPTSSYVWRNIIPHVAPTHRCIAPDLIGMGKSDKPDLGYFFDDHVRFMDAFIEALGLEEVVLVIHDWGSALGFHWAKRNPERVKGIAFMEFIRPIPTWDEWPEFARETFQAFRTTDVGRKLIIDQNVFIEGTLPMGVVRPLTEVEMDHYREPFLNPVDREPLWRFPNELPIAGEPANIVALVEEYMDWLHQSPVPKLLFWGTPGVLIPPAEAARLAKSLPNCKAVDIGPGLNLLQEDNPDLIGSEIARWLSTIEISG

SEQ ID NO: 2806 - protein, 277 aa, Synthetic construct
MFHYVDVGPRDGTPVLFLHGNPTSSYVWRNIIPHVAPTHRCIAPDLIGMGKSDKPDLGYFFDDHVRFMDAFIEALGLEEVVLVIHDWGSALGFHWAKRNPERVKGIAFMEFIRPIPTWDEWPEFARETFQAFRTTDVGRKLIIDQNVFIEGTLPMGVVRPLTEVEMDHYREPFLNPVDREPLWRFPNELPIAGEPANIVALVEEYMDWLHQSPVPKLLFWGTPGVLIPPAEAARLAKSLPNCKAVDIGPGLNLLQEDNPDLIGSEIARWLSTVEISG

SEQ ID NO: 2807 - protein, 277 aa, Synthetic construct
MFHYVDVGPRDGTPVLFLHGNPTSSYVWRNIIPHVAPTHRCIAPDLIGMGKSDKPDLGYFFDDHVRFMDAFIEALGLEEVVLVIHDWGSALGFHWAKRNPERVKGIAFMEFIRPIPTWDEWPEFARETFQAFRTTDVGRKLIIDQNVFIEGTLPMGVVRPLTEVEMDHYREPFLNPVDREPLWRFPNELPIAGEPANIVALVEEYMDWLHQSPVPKLLFWGTPGVLIPPAEAARLAKSLPNCKAVDIGPGLNLLQEDNPDLIGSEIARWLSTQEISG

SEQ ID NO: 2808 - protein, 277 aa, Synthetic construct
MFHYVDVGPRDGTPVLFLHGNPTSSYVWRNIIPHVAPTHRCIAPDLIGMGKSDKPDLGYFFDDHVRFMDAFIEALGLEEVVLVIHDWGSALGFHWAKRNPERVKGIAFMEFIRPIPTWDEWPEFARETFQAFRTTDVGRKLIIDQNVFIEGTLPMGVVRPLTEVEMDHYREPFLNPVDREPLWRFPNELPIAGEPANIVALVEEYMDWLHQSPVPKLLFWGTPGVLIPPAEAARLAKSLPNCKAVDIGPGLNLLQEDNPDLIGSEIARWLSTHEISG

SEQ ID NO: 2809 - protein, 277 aa, Synthetic construct
MFHYVDVGPRDGTPVLFLHGNPTSSYVWRNIIPHVAPTHRCIAPDLIGMGKSDKPDLGYFFDDHVRFMDAFIEALGLEEVVLVIHDWGSALGFHWAKRNPERVKGIAFMEFIRPIPTWDEWPEFARETFQAFRTTDVGRKLIIDQNVFIEGTLPMGVVRPLTEVEMDHYREPFLNPVDREPLWRFPNELPIAGEPANIVALVEEYMDWLHQSPVPKLLFWGTPGVLIPPAEAARLAKSLPNCKAVDIGPGLNLLQEDNPDLIGSEIARWLSTTEISG

SEQ ID NO: 2810 - protein, 277 aa, Synthetic construct
MFHYVDVGPRDGTPVLFLHGNPTSSYVWRNIIPHVAPTHRCIAPDLIGMGKSDKPDLGYFFDDHVRFMDAFIEALGLEEVVLVIHDWGSALGFHWAKRNPERVKGIAFMEFIRPIPTWDEWPEFARETFQAFRTTDVGRKLIIDQNVFIEGTLPMGVVRPLTEVEMDHYREPFLNPVDREPLWRFPNELPIAGEPANIVALVEEYMDWLHQSPVPKLLFWGTPGVLIPPAEAARLAKSLPNCKAVDIGPGLNLLQEDNPDLIGSEIARWLSTAEISG

SEQ ID NO: 2811 - protein, 277 aa, Synthetic construct
MFHYVDVGPRDGTPVLFLHGNPTSSYVWRNIIPHVAPTHRCIAPDLIGMGKSDKPDLGYFFDDHVRFMDAFIEALGLEEVVLVIHDWGSALGFHWAKRNPERVKGIAFMEFIRPIPTWDEWPEFARETFQAFRTTDVGRKLIIDQNVFIEGTLPMGVVRPLTEVEMDHYREPFLNPVDREPLWRFPNELPIAGEPANIVALVEEYMDWLHQSPVPKLLFWGTPGVLIPPAEAARLAKSLPNCKAVDIGPGLNLLQEDNPDLIGSEIARWLSTLPISG

SEQ ID NO: 2812 - protein, 277 aa, Synthetic construct
MFHYVDVGPRDGTPVLFLHGNPTSSYVWRNIIPHVAPTHRCIAPDLIGMGKSDKPDLGYFFDDHVRFMDAFIEALGLEEVVLVIHDWGSALGFHWAKRNPERVKGIAFMEFIRPIPTWDEWPEFARETFQAFRTTDVGRKLIIDQNVFIEGTLPMGVVRPLTEVEMDHYREPFLNPVDREPLWRFPNELPIAGEPANIVALVEEYMDWLHQSPVPKLLFWGTPGVLIPPAEAARLAKSLPNCKAVDIGPGLNLLQEDNPDLIGSEIARWLSTLGISG

SEQ ID NO: 2813 - protein, 277 aa, Synthetic construct
MFHYVDVGPRDGTPVLFLHGNPTSSYVWRNIIPHVAPTHRCIAPDLIGMGKSDKPDLGYFFDDHVRFMDAFIEALGLEEVVLVIHDWGSALGFHWAKRNPERVKGIAFMEFIRPIPTWDEWPEFARETFQAFRTTDVGRKLIIDQNVFIEGTLPMGVVRPLTEVEMDHYREPFLNPVDREPLWRFPNELPIAGEPANIVALVEEYMDWLHQSPVPKLLFWGTPGVLIPPAEAARLAKSLPNCKAVDIGPGLNLLQEDNPDLIGSEIARWLSTLDISG

SEQ ID NO: 2814 - protein, 277 aa, Synthetic construct
MFHYVDVGPRDGTPVLFLHGNPTSSYVWRNIIPHVAPTHRCIAPDLIGMGKSDKPDLGYFFDDHVRFMDAFIEALGLEEVVLVIHDWGSALGFHWAKRNPERVKGIAFMEFIRPIPTWDEWPEFARETFQAFRTTDVGRKLIIDQNVFIEGTLPMGVVRPLTEVEMDHYREPFLNPVDREPLWRFPNELPIAGEPANIVALVEEYMDWLHQSPVPKLLFWGTPGVLIPPAEAARLAKSLPNCKAVDIGPGLNLLQEDNPDLIGSEIARWLSTLSISG

SEQ ID NO: 2815 - protein, 277 aa, Synthetic construct
MFHYVDVGPRDGTPVLFLHGNPTSSYVWRNIIPHVAPTHRCIAPDLIGMGKSDKPDLGYFFDDHVRFMDAFIEALGLEEVVLVIHDWGSALGFHWAKRNPERVKGIAFMEFIRPIPTWDEWPEFARETFQAFRTTDVGRKLIIDQNVFIEGTLPMGVVRPLTEVEMDHYREPFLNPVDREPLWRFPNELPIAGEPANIVALVEEYMDWLHQSPVPKLLFWGTPGVLIPPAEAARLAKSLPNCKAVDIGPGLNLLQEDNPDLIGSEIARWLSTLAISG

SEQ ID NO: 2816 - protein, 277 aa, Synthetic construct
MFHYVDVGPRDGTPVLFLHGNPTSSYVWRNIIPHVAPTHRCIAPDLIGMGKSDKPDLGYFFDDHVRFMDAFIEALGLEEVVLVIHDWGSALGFHWAKRNPERVKGIAFMEFIRPIPTWDEWPEFARETFQAFRTTDVGRKLIIDQNVFIEGTLPMGVVRPLTEVEMDHYREPFLNPVDREPLWRFPNELPIAGEPANIVALVEEYMDWLHQSPVPKLLFWGTPGVLIPPAEAARLAKSLPNCKAVDIGPGLNLLQEDNPDLIGSEIARWLSTLKISG

SEQ ID NO: 2817 - protein, 277 aa, Synthetic construct
MFHYVDVGPRDGTPVLFLHGNPTSSYVWRNIIPHVAPTHRCIAPDLIGMGKSDKPDLGYFFDDHVRFMDAFIEALGLEEVVLVIHDWGSALGFHWAKRNPERVKGIAFMEFIRPIPTWDEWPEFARETFQAFRTTDVGRKLIIDQNVFIEGTLPMGVVRPLTEVEMDHYREPFLNPVDREPLWRFPNELPIAGEPANIVALVEEYMDWLHQSPVPKLLFWGTPGVLIPPAEAARLAKSLPNCKAVDIGPGLNLLQEDNPDLIGSEIARWLSTLEASG

SEQ ID NO: 2818 - protein, 277 aa, Synthetic construct
MFHYVDVGPRDGTPVLFLHGNPTSSYVWRNIIPHVAPTHRCIAPDLIGMGKSDKPDLGYFFDDHVRFMDAFIEALGLEEVVLVIHDWGSALGFHWAKRNPERVKGIAFMEFIRPIPTWDEWPEFARETFQAFRTTDVGRKLIIDQNVFIEGTLPMGVVRPLTEVEMDHYREPFLNPVDREPLWRFPNELPIAGEPANIVALVEEYMDWLHQSPVPKLLFWGTPGVLIPPAEAARLAKSLPNCKAVDIGPGLNLLQEDNPDLIGSEIARWLSTLELSG

SEQ ID NO: 2819 - protein, 277 aa, Synthetic construct
MFHYVDVGPRDGTPVLFLHGNPTSSYVWRNIIPHVAPTHRCIAPDLIGMGKSDKPDLGYFFDDHVRFMDAFIEALGLEEVVLVIHDWGSALGFHWAKRNPERVKGIAFMEFIRPIPTWDEWPEFARETFQAFRTTDVGRKLIIDQNVFIEGTLPMGVVRPLTEVEMDHYREPFLNPVDREPLWRFPNELPIAGEPANIVALVEEYMDWLHQSPVPKLLFWGTPGVLIPPAEAARLAKSLPNCKAVDIGPGLNLLQEDNPDLIGSEIARWLSTLESSG

SEQ ID NO: 2820 - protein, 277 aa, Synthetic construct
MFHYVDVGPRDGTPVLFLHGNPTSSYVWRNIIPHVAPTHRCIAPDLIGMGKSDKPDLGYFFDDHVRFMDAFIEALGLEEVVLVIHDWGSALGFHWAKRNPERVKGIAFMEFIRPIPTWDEWPEFARETFQAFRTTDVGRKLIIDQNVFIEGTLPMGVVRPLTEVEMDHYREPFLNPVDREPLWRFPNELPIAGEPANIVALVEEYMDWLHQSPVPKLLFWGTPGVLIPPAEAARLAKSLPNCKAVDIGPGLNLLQEDNPDLIGSEIARWLSTLEPSG

SEQ ID NO: 2821 - protein, 277 aa, Synthetic construct
MFHYVDVGPRDGTPVLFLHGNPTSSYVWRNIIPHVAPTHRCIAPDLIGMGKSDKPDLGYFFDDHVRFMDAFIEALGLEEVVLVIHDWGSALGFHWAKRNPERVKGIAFMEFIRPIPTWDEWPEFARETFQAFRTTDVGRKLIIDQNVFIEGTLPMGVVRPLTEVEMDHYREPFLNPVDREPLWRFPNELPIAGEPANIVALVEEYMDWLHQSPVPKLLFWGTPGVLIPPAEAARLAKSLPNCKAVDIGPGLNLLQEDNPDLIGSEIARWLSTLEVSG

SEQ ID NO: 2822 - protein, 277 aa, Synthetic construct
MFHYVDVGPRDGTPVLFLHGNPTSSYVWRNIIPHVAPTHRCIAPDLIGMGKSDKPDLGYFFDDHVRFMDAFIEALGLEEVVLVIHDWGSALGFHWAKRNPERVKGIAFMEFIRPIPTWDEWPEFARETFQAFRTTDVGRKLIIDQNVFIEGTLPMGVVRPLTEVEMDHYREPFLNPVDREPLWRFPNELPIAGEPANIVALVEEYMDWLHQSPVPKLLFWGTPGVLIPPAEAARLAKSLPNCKAVDIGPGLNLLQEDNPDLIGSEIARWLSTLETSG

SEQ ID NO: 2823 - protein, 277 aa, Synthetic construct
MFHYVDVGPRDGTPVLFLHGNPTSSYVWRNIIPHVAPTHRCIAPDLIGMGKSDKPDLGYFFDDHVRFMDAFIEALGLEEVVLVIHDWGSALGFHWAKRNPERVKGIAFMEFIRPIPTWDEWPEFARETFQAFRTTDVGRKLIIDQNVFIEGTLPMGVVRPLTEVEMDHYREPFLNPVDREPLWRFPNELPIAGEPANIVALVEEYMDWLHQSPVPKLLFWGTPGVLIPPAEAARLAKSLPNCKAVDIGPGLNLLQEDNPDLIGSEIARWLSTLEIAG

SEQ ID NO: 2824 - protein, 277 aa, Synthetic construct
MFHYVDVGPRDGTPVLFLHGNPTSSYVWRNIIPHVAPTHRCIAPDLIGMGKSDKPDLGYFFDDHVRFMDAFIEALGLEEVVLVIHDWGSALGFHWAKRNPERVKGIAFMEFIRPIPTWDEWPEFARETFQAFRTTDVGRKLIIDQNVFIEGTLPMGVVRPLTEVEMDHYREPFLNPVDREPLWRFPNELPIAGEPANIVALVEEYMDWLHQSPVPKLLFWGTPGVLIPPAEAARLAKSLPNCKAVDIGPGLNLLQEDNPDLIGSEIARWLSTLEIGG

SEQ ID NO: 2825 - protein, 277 aa, Synthetic construct
MFHYVDVGPRDGTPVLFLHGNPTSSYVWRNIIPHVAPTHRCIAPDLIGMGKSDKPDLGYFFDDHVRFMDAFIEALGLEEVVLVIHDWGSALGFHWAKRNPERVKGIAFMEFIRPIPTWDEWPEFARETFQAFRTTDVGRKLIIDQNVFIEGTLPMGVVRPLTEVEMDHYREPFLNPVDREPLWRFPNELPIAGEPANIVALVEEYMDWLHQSPVPKLLFWGTPGVLIPPAEAARLAKSLPNCKAVDIGPGLNLLQEDNPDLIGSEIARWLSTLEIPG

SEQ ID NO: 2826 - protein, 277 aa, Synthetic construct
MFHYVDVGPRDGTPVLFLHGNPTSSYVWRNIIPHVAPTHRCIAPDLIGMGKSDKPDLGYFFDDHVRFMDAFIEALGLEEVVLVIHDWGSALGFHWAKRNPERVKGIAFMEFIRPIPTWDEWPEFARETFQAFRTTDVGRKLIIDQNVFIEGTLPMGVVRPLTEVEMDHYREPFLNPVDREPLWRFPNELPIAGEPANIVALVEEYMDWLHQSPVPKLLFWGTPGVLIPPAEAARLAKSLPNCKAVDIGPGLNLLQEDNPDLIGSEIARWLSTLEITG

SEQ ID NO: 2827 - protein, 277 aa, Synthetic construct
MFHYVDVGPRDGTPVLFLHGNPTSSYVWRNIIPHVAPTHRCIAPDLIGMGKSDKPDLGYFFDDHVRFMDAFIEALGLEEVVLVIHDWGSALGFHWAKRNPERVKGIAFMEFIRPIPTWDEWPEFARETFQAFRTTDVGRKLIIDQNVFIEGTLPMGVVRPLTEVEMDHYREPFLNPVDREPLWRFPNELPIAGEPANIVALVEEYMDWLHQSPVPKLLFWGTPGVLIPPAEAARLAKSLPNCKAVDIGPGLNLLQEDNPDLIGSEIARWLSTLEIRG

SEQ ID NO: 2828 - protein, 277 aa, Synthetic construct
MFHYVDVGPRDGTPVLFLHGNPTSSYVWRNIIPHVAPTHRCIAPDLIGMGKSDKPDLGYFFDDHVRFMDAFIEALGLEEVVLVIHDWGSALGFHWAKRNPERVKGIAFMEFIRPIPTWDEWPEFARETFQAFRTTDVGRKLIIDQNVFIEGTLPMGVVRPLTEVEMDHYREPFLNPVDREPLWRFPNELPIAGEPANIVALVEEYMDWLHQSPVPKLLFWGTPGVLIPPAEAARLAKSLPNCKAVDIGPGLNLLQEDNPDLIGSEIARWLSTLEIEG

SEQ ID NO: 2829 - protein, 277 aa, Synthetic construct
MFHYVDVGPRDGTPVLFLHGNPTSSYVWRNIIPHVAPTHRCIAPDLIGMGKSDKPDLGYFFDDHVRFMDAFIEALGLEEVVLVIHDWGSALGFHWAKRNPERVKGIAFMEFIRPIPTWDEWPEFARETFQAFRTTDVGRKLIIDQNVFIEGTLPMGVVRPLTEVEMDHYREPFLNPVDREPLWRFPNELPIAGEPANIVALVEEYMDWLHQSPVPKLLFWGTPGVLIPPAEAARLAKSLPNCKAVDIGPGLNLLQEDNPDLIGSEIARWLSTLEISA

SEQ ID NO: 2830 - protein, 277 aa, Synthetic construct
MFHYVDVGPRDGTPVLFLHGNPTSSYVWRNIIPHVAPTHRCIAPDLIGMGKSDKPDLGYFFDDHVRFMDAFIEALGLEEVVLVIHDWGSALGFHWAKRNPERVKGIAFMEFIRPIPTWDEWPEFARETFQAFRTTDVGRKLIIDQNVFIEGTLPMGVVRPLTEVEMDHYREPFLNPVDREPLWRFPNELPIAGEPANIVALVEEYMDWLHQSPVPKLLFWGTPGVLIPPAEAARLAKSLPNCKAVDIGPGLNLLQEDNPDLIGSEIARWLSTLEISS

SEQ ID NO: 2831 - protein, 277 aa, Synthetic construct
MFHYVDVGPRDGTPVLFLHGNPTSSYVWRNIIPHVAPTHRCIAPDLIGMGKSDKPDLGYFFDDHVRFMDAFIEALGLEEVVLVIHDWGSALGFHWAKRNPERVKGIAFMEFIRPIPTWDEWPEFARETFQAFRTTDVGRKLIIDQNVFIEGTLPMGVVRPLTEVEMDHYREPFLNPVDREPLWRFPNELPIAGEPANIVALVEEYMDWLHQSPVPKLLFWGTPGVLIPPAEAARLAKSLPNCKAVDIGPGLNLLQEDNPDLIGSEIARWLSTLEISR

SEQ ID NO: 2832 - protein, 277 aa, Synthetic construct
MFHYVDVGPRDGTPVLFLHGNPTSSYVWRNIIPHVAPTHRCIAPDLIGMGKSDKPDLGYFFDDHVRFMDAFIEALGLEEVVLVIHDWGSALGFHWAKRNPERVKGIAFMEFIRPIPTWDEWPEFARETFQAFRTTDVGRKLIIDQNVFIEGTLPMGVVRPLTEVEMDHYREPFLNPVDREPLWRFPNELPIAGEPANIVALVEEYMDWLHQSPVPKLLFWGTPGVLIPPAEAARLAKSLPNCKAVDIGPGLNLLQEDNPDLIGSEIARWLSTLEIST

SEQ ID NO: 2833 - protein, 277 aa, Synthetic construct
MFHYVDVGPRDGTPVLFLHGNPTSSYVWRNIIPHVAPTHRCIAPDLIGMGKSDKPDLGYFFDDHVRFMDAFIEALGLEEVVLVIHDWGSALGFHWAKRNPERVKGIAFMEFIRPIPTWDEWPEFARETFQAFRTTDVGRKLIIDQNVFIEGTLPMGVVRPLTEVEMDHYREPFLNPVDREPLWRFPNELPIAGEPANIVALVEEYMDWLHQSPVPKLLFWGTPGVLIPPAEAARLAKSLPNCKAVDIGPGLNLLQEDNPDLIGSEIARWLSTLEISP

SEQ ID NO: 2834 - protein, 277 aa, Synthetic construct
MFHYVDVGPRDGTPVLFLHGNPTSSYVWRNIIPHVAPTHRCIAPDLIGMGKSDKPDLGYFFDDHVRFMDAFIEALGLEEVVLVIHDWGSALGFHWAKRNPERVKGIAFMEFIRPIPTWDEWPEFARETFQAFRTTDVGRKLIIDQNVFIEGTLPMGVVRPLTEVEMDHYREPFLNPVDREPLWRFPNELPIAGEPANIVALVEEYMDWLHQSPVPKLLFWGTPGVLIPPAEAARLAKSLPNCKAVDIGPGLNLLQEDNPDLIGSEIARWLSTLEISK

SEQ ID NO: 2835 - protein, 277 aa, Synthetic construct
MFHYVDEGPRDGTPVLFLHGNPTSSYVWRNIIPHVAPTHRCIAPDLIGMGKSDKPDLGYFFDDHVRFMDAFIEALGLEEVVLVIHDWGSALGFHWAKRNPERVKGIAFMEFIRPIPTWDEWPEFARETFQAFRTTDVGRKLIIDQNVFIEGTLPMGVVRPLTEVEMDHYREPFLNPADREPLWRFPNELPIAGEPANIVALVEEYMDWLHQSPVPKLLFWGTPGVLIPPAEAARLAKSLPNCKAVDIGPGLNLLQEDNPDLIGSEIARWLSTLEISG

SEQ ID NO: 2836 - protein, 277 aa, Synthetic construct
MFHYVDEGPRDGTPVLFLHGNPTSSYVWRNIIPHVAPTHRCIAPDLIGMGKSDKPDLGYFFDDHVRFMDAFIEALGLEEVVLVIHDWGSALGFHWAKRNPERVKGIAFMEFIRPIPTWDEWPEFARETFQAFRTTDVGRKLIIDQNVFIEGTLPMGVVRPLTEVEMDHYREPFLNPVDREPLWRFPNELPIAGEPANVVALVEEYMDWLHQSPVPKLLFWGTPGVLIPPAEAARLAKSLPNCKAVDIGPGLNLLQEDNPDLIGSEIARWLSTLEISG

SEQ ID NO: 2837 - protein, 277 aa, Synthetic construct
MFHYVDEGPRDGTPVLFLHGNPTSSYVWRNIIPHVAPTHRCIAPDLIGMGKSDKPDLGYFFDDHVRFMDAFIEALGLEEVVLVIHDWGSALGFHWAKRNPERVKGIAFMEFIRPIPTWDEWPEFARETFQAFRTTDVGRKLIIDQNVFIEGTLPMGVVRPLTEVEMDHYREPFLNPVDREPLWRFPNELPIAGEPANIVAIVEEYMDWLHQSPVPKLLFWGTPGVLIPPAEAARLAKSLPNCKAVDIGPGLNLLQEDNPDLIGSEIARWLSTLEISG

SEQ ID NO: 2838 - protein, 277 aa, Synthetic construct
MFHYVDEGPRDGTPVLFLHGNPTSSYVWRNIIPHVAPTHRCIAPDLIGMGKSDKPDLGYFFDDHVRFMDAFIEALGLEEVVLVIHDWGSALGFHWAKRNPERVKGIAFMEFIRPIPTWDEWPEFARETFQAFRTTDVGRKLIIDQNVFIEGTLPMGVVRPLTEVEMDHYREPFLNPVDREPLWRFPNELPIAGEPANIVALVDEYMDWLHQSPVPKLLFWGTPGVLIPPAEAARLAKSLPNCKAVDIGPGLNLLQEDNPDLIGSEIARWLSTLEISG

SEQ ID NO: 2839 - protein, 277 aa, Synthetic construct
MFHYVDEGPRDGTPVLFLHGNPTSSYVWRNIIPHVAPTHRCIAPDLIGMGKSDKPDLGYFFDDHVRFMDAFIEALGLEEVVLVIHDWGSALGFHWAKRNPERVKGIAFMEFIRPIPTWDEWPEFARETFQAFRTTDVGRKLIIDQNVFIEGTLPMGVVRPLTEVEMDHYREPFLNPVDREPLWRFPNELPIAGEPANIVALVEEYMDWLHTSPVPKLLFWGTPGVLIPPAEAARLAKSLPNCKAVDIGPGLNLLQEDNPDLIGSEIARWLSTLEISG

SEQ ID NO: 2840 - protein, 277 aa, Synthetic construct
MFHYVDEGPRDGTPVLFLHGNPTSSYVWRNIIPHVAPTHRCIAPDLIGMGKSDKPDLGYFFDDHVRFMDAFIEALGLEEVVLVIHDWGSALGFHWAKRNPERVKGIAFMEFIRPIPTWDEWPEFARETFQAFRTTDVGRKLIIDQNVFIEGTLPMGVVRPLTEVEMDHYREPFLNPVDREPLWRFPNELPIAGEPANIVALVEEYMDWLHQSPVPKLLFWGTPGVLIPPAEAARLAESLPNCKAVDIGPGLNLLQEDNPDLIGSEIARWLSTLEISG

SEQ ID NO: 2841 - protein, 277 aa, Synthetic construct
MFHYVDEGPRDGTPVLFLHGNPTSSYVWRNIIPHVAPTHRCIAPDLIGMGKSDKPDLGYFFDDHVRFMDAFIEALGLEEVVLVIHDWGSALGFHWAKRNPERVKGIAFMEFIRPIPTWDEWPEFARETFQAFRTTDVGRKLIIDQNVFIEGTLPMGVVRPLTEVEMDHYREPFLNPVDREPLWRFPNELPIAGEPANIVALVEEYMDWLHQSPVPKLLFWGTPGVLIPPAEAARLAKTLPNCKAVDIGPGLNLLQEDNPDLIGSEIARWLSTLEISG

SEQ ID NO: 2842 - protein, 277 aa, Synthetic construct
MFHYVDEGPRDGTPVLFLHGNPTSSYVWRNIIPHVAPTHRCIAPDLIGMGKSDKPDLGYFFDDHVRFMDAFIEALGLEEVVLVIHDWGSALGFHWAKRNPERVKGIAFMEFIRPIPTWDEWPEFARETFQAFRTTDVGRKLIIDQNVFIEGTLPMGVVRPLTEVEMDHYREPFLNPVDREPLWRFPNELPIAGEPANIVALVEEYMDWLHQSPVPKLLFWGTPGVLIPPAEAARLAKSLPNCKAVDVGPGLNLLQEDNPDLIGSEIARWLSTLEISG

SEQ ID NO: 2843 - protein, 277 aa, Synthetic construct
MFHYVDEGPRDGTPVLFLHGNPTSSYVWRNIIPHVAPTHRCIAPDLIGMGKSDKPDLGYFFDDHVRFMDAFIEALGLEEVVLVIHDWGSALGFHWAKRNPERVKGIAFMEFIRPIPTWDEWPEFARETFQAFRTTDVGRKLIIDQNVFIEGTLPMGVVRPLTEVEMDHYREPFLNPVDREPLWRFPNELPIAGEPANIVALVEEYMDWLHQSPVPKLLFWGTPGVLIPPAEAARLAKSLPNCKAVDIGPGLNLLQEDNPDLIGAEIARWLSTLEISG

SEQ ID NO: 2844 - protein, 277 aa, Synthetic construct
MFHYVDVGPRDGTPVLFLHGNPTSSYVWRNIIPHVSPTHRCIAPDLIGMGKSDKPDLGYFFDDHVRFMDAFIEALGLEEVVLVIHDWGSALGFHWAKRNPERVKGIAFMEFIRPIPTWDEWPEFARETFQAFRTTDVGRKLIIDQNVFIEGTLPMGVVRPLTEVEMDHYREPFLNPADREPLWRFPNELPIAGEPANIVALVEEYMDWLHQSPVPKLLFWGTPGVLIPPAEAARLAKSLPNCKAVDIGPGLNLLQEDNPDLIGSEIARWLSTLEISG

SEQ ID NO: 2845 - protein, 277 aa, Synthetic construct
MFHYVDVGPRDGTPVLFLHGNPTSSYVWRNIIPHVSPTHRCIAPDLIGMGKSDKPDLGYFFDDHVRFMDAFIEALGLEEVVLVIHDWGSALGFHWAKRNPERVKGIAFMEFIRPIPTWDEWPEFARETFQAFRTTDVGRKLIIDQNVFIEGTLPMGVVRPLTEVEMDHYREPFLNPVDREPLWRFPNELPIAGEPANVVALVEEYMDWLHQSPVPKLLFWGTPGVLIPPAEAARLAKSLPNCKAVDIGPGLNLLQEDNPDLIGSEIARWLSTLEISG

SEQ ID NO: 2846 - protein, 277 aa, Synthetic construct
MFHYVDVGPRDGTPVLFLHGNPTSSYVWRNIIPHVSPTHRCIAPDLIGMGKSDKPDLGYFFDDHVRFMDAFIEALGLEEVVLVIHDWGSALGFHWAKRNPERVKGIAFMEFIRPIPTWDEWPEFARETFQAFRTTDVGRKLIIDQNVFIEGTLPMGVVRPLTEVEMDHYREPFLNPVDREPLWRFPNELPIAGEPANIVAIVEEYMDWLHQSPVPKLLFWGTPGVLIPPAEAARLAKSLPNCKAVDIGPGLNLLQEDNPDLIGSEIARWLSTLEISG

SEQ ID NO: 2847 - protein, 277 aa, Synthetic construct
MFHYVDVGPRDGTPVLFLHGNPTSSYVWRNIIPHVSPTHRCIAPDLIGMGKSDKPDLGYFFDDHVRFMDAFIEALGLEEVVLVIHDWGSALGFHWAKRNPERVKGIAFMEFIRPIPTWDEWPEFARETFQAFRTTDVGRKLIIDQNVFIEGTLPMGVVRPLTEVEMDHYREPFLNPVDREPLWRFPNELPIAGEPANIVALVDEYMDWLHQSPVPKLLFWGTPGVLIPPAEAARLAKSLPNCKAVDIGPGLNLLQEDNPDLIGSEIARWLSTLEISG

SEQ ID NO: 2848 - protein, 277 aa, Synthetic construct
MFHYVDVGPRDGTPVLFLHGNPTSSYVWRNIIPHVSPTHRCIAPDLIGMGKSDKPDLGYFFDDHVRFMDAFIEALGLEEVVLVIHDWGSALGFHWAKRNPERVKGIAFMEFIRPIPTWDEWPEFARETFQAFRTTDVGRKLIIDQNVFIEGTLPMGVVRPLTEVEMDHYREPFLNPVDREPLWRFPNELPIAGEPANIVALVEEYMDWLHTSPVPKLLFWGTPGVLIPPAEAARLAKSLPNCKAVDIGPGLNLLQEDNPDLIGSEIARWLSTLEISG

SEQ ID NO: 2849 - protein, 277 aa, Synthetic construct
MFHYVDVGPRDGTPVLFLHGNPTSSYVWRNIIPHVSPTHRCIAPDLIGMGKSDKPDLGYFFDDHVRFMDAFIEALGLEEVVLVIHDWGSALGFHWAKRNPERVKGIAFMEFIRPIPTWDEWPEFARETFQAFRTTDVGRKLIIDQNVFIEGTLPMGVVRPLTEVEMDHYREPFLNPVDREPLWRFPNELPIAGEPANIVALVEEYMDWLHQSPVPKLLFWGTPGVLIPPAEAARLAESLPNCKAVDIGPGLNLLQEDNPDLIGSEIARWLSTLEISG

SEQ ID NO: 2850 - protein, 277 aa, Synthetic construct
MFHYVDVGPRDGTPVLFLHGNPTSSYVWRNIIPHVSPTHRCIAPDLIGMGKSDKPDLGYFFDDHVRFMDAFIEALGLEEVVLVIHDWGSALGFHWAKRNPERVKGIAFMEFIRPIPTWDEWPEFARETFQAFRTTDVGRKLIIDQNVFIEGTLPMGVVRPLTEVEMDHYREPFLNPVDREPLWRFPNELPIAGEPANIVALVEEYMDWLHQSPVPKLLFWGTPGVLIPPAEAARLAKTLPNCKAVDIGPGLNLLQEDNPDLIGSEIARWLSTLEISG

SEQ ID NO: 2851 - protein, 277 aa, Synthetic construct
MFHYVDVGPRDGTPVLFLHGNPTSSYVWRNIIPHVSPTHRCIAPDLIGMGKSDKPDLGYFFDDHVRFMDAFIEALGLEEVVLVIHDWGSALGFHWAKRNPERVKGIAFMEFIRPIPTWDEWPEFARETFQAFRTTDVGRKLIIDQNVFIEGTLPMGVVRPLTEVEMDHYREPFLNPVDREPLWRFPNELPIAGEPANIVALVEEYMDWLHQSPVPKLLFWGTPGVLIPPAEAARLAKSLPNCKAVDVGPGLNLLQEDNPDLIGSEIARWLSTLEISG

SEQ ID NO: 2852 - protein, 277 aa, Synthetic construct
MFHYVDVGPRDGTPVLFLHGNPTSSYVWRNIIPHVSPTHRCIAPDLIGMGKSDKPDLGYFFDDHVRFMDAFIEALGLEEVVLVIHDWGSALGFHWAKRNPERVKGIAFMEFIRPIPTWDEWPEFARETFQAFRTTDVGRKLIIDQNVFIEGTLPMGVVRPLTEVEMDHYREPFLNPVDREPLWRFPNELPIAGEPANIVALVEEYMDWLHQSPVPKLLFWGTPGVLIPPAEAARLAKSLPNCKAVDIGPGLNLLQEDNPDLIGAEIARWLSTLEISG

SEQ ID NO: 2853 - protein, 277 aa, Synthetic construct
MFHYVDVGPRDGTPVLFLHGNPTSSYVWRNIIPHVAPTHRCIAPDLIGFGKSDKPDLGYFFDDHVRFMDAFIEALGLEEVVLVIHDWGSALGFHWAKRNPERVKGIAFMEFIRPIPTWDEWPEFARETFQAFRTTDVGRKLIIDQNVFIEGTLPMGVVRPLTEVEMDHYREPFLNPADREPLWRFPNELPIAGEPANIVALVEEYMDWLHQSPVPKLLFWGTPGVLIPPAEAARLAKSLPNCKAVDIGPGLNLLQEDNPDLIGSEIARWLSTLEISG

SEQ ID NO: 2854 - protein, 277 aa, Synthetic construct
MFHYVDVGPRDGTPVLFLHGNPTSSYVWRNIIPHVAPTHRCIAPDLIGFGKSDKPDLGYFFDDHVRFMDAFIEALGLEEVVLVIHDWGSALGFHWAKRNPERVKGIAFMEFIRPIPTWDEWPEFARETFQAFRTTDVGRKLIIDQNVFIEGTLPMGVVRPLTEVEMDHYREPFLNPVDREPLWRFPNELPIAGEPANVVALVEEYMDWLHQSPVPKLLFWGTPGVLIPPAEAARLAKSLPNCKAVDIGPGLNLLQEDNPDLIGSEIARWLSTLEISG

SEQ ID NO: 2855 - protein, 277 aa, Synthetic construct
MFHYVDVGPRDGTPVLFLHGNPTSSYVWRNIIPHVAPTHRCIAPDLIGFGKSDKPDLGYFFDDHVRFMDAFIEALGLEEVVLVIHDWGSALGFHWAKRNPERVKGIAFMEFIRPIPTWDEWPEFARETFQAFRTTDVGRKLIIDQNVFIEGTLPMGVVRPLTEVEMDHYREPFLNPVDREPLWRFPNELPIAGEPANIVAIVEEYMDWLHQSPVPKLLFWGTPGVLIPPAEAARLAKSLPNCKAVDIGPGLNLLQEDNPDLIGSEIARWLSTLEISG

SEQ ID NO: 2856 - protein, 277 aa, Synthetic construct
MFHYVDVGPRDGTPVLFLHGNPTSSYVWRNIIPHVAPTHRCIAPDLIGFGKSDKPDLGYFFDDHVRFMDAFIEALGLEEVVLVIHDWGSALGFHWAKRNPERVKGIAFMEFIRPIPTWDEWPEFARETFQAFRTTDVGRKLIIDQNVFIEGTLPMGVVRPLTEVEMDHYREPFLNPVDREPLWRFPNELPIAGEPANIVALVDEYMDWLHQSPVPKLLFWGTPGVLIPPAEAARLAKSLPNCKAVDIGPGLNLLQEDNPDLIGSEIARWLSTLEISG

SEQ ID NO: 2857 - protein, 277 aa, Synthetic construct
MFHYVDVGPRDGTPVLFLHGNPTSSYVWRNIIPHVAPTHRCIAPDLIGFGKSDKPDLGYFFDDHVRFMDAFIEALGLEEVVLVIHDWGSALGFHWAKRNPERVKGIAFMEFIRPIPTWDEWPEFARETFQAFRTTDVGRKLIIDQNVFIEGTLPMGVVRPLTEVEMDHYREPFLNPVDREPLWRFPNELPIAGEPANIVALVEEYMDWLHTSPVPKLLFWGTPGVLIPPAEAARLAKSLPNCKAVDIGPGLNLLQEDNPDLIGSEIARWLSTLEISG

SEQ ID NO: 2858 - protein, 277 aa, Synthetic construct
MFHYVDVGPRDGTPVLFLHGNPTSSYVWRNIIPHVAPTHRCIAPDLIGFGKSDKPDLGYFFDDHVRFMDAFIEALGLEEVVLVIHDWGSALGFHWAKRNPERVKGIAFMEFIRPIPTWDEWPEFARETFQAFRTTDVGRKLIIDQNVFIEGTLPMGVVRPLTEVEMDHYREPFLNPVDREPLWRFPNELPIAGEPANIVALVEEYMDWLHQSPVPKLLFWGTPGVLIPPAEAARLAESLPNCKAVDIGPGLNLLQEDNPDLIGSEIARWLSTLEISG

SEQ ID NO: 2859 - protein, 277 aa, Synthetic construct
MFHYVDVGPRDGTPVLFLHGNPTSSYVWRNIIPHVAPTHRCIAPDLIGFGKSDKPDLGYFFDDHVRFMDAFIEALGLEEVVLVIHDWGSALGFHWAKRNPERVKGIAFMEFIRPIPTWDEWPEFARETFQAFRTTDVGRKLIIDQNVFIEGTLPMGVVRPLTEVEMDHYREPFLNPVDREPLWRFPNELPIAGEPANIVALVEEYMDWLHQSPVPKLLFWGTPGVLIPPAEAARLAKTLPNCKAVDIGPGLNLLQEDNPDLIGSEIARWLSTLEISG

SEQ ID NO: 2860 - protein, 277 aa, Synthetic construct
MFHYVDVGPRDGTPVLFLHGNPTSSYVWRNIIPHVAPTHRCIAPDLIGFGKSDKPDLGYFFDDHVRFMDAFIEALGLEEVVLVIHDWGSALGFHWAKRNPERVKGIAFMEFIRPIPTWDEWPEFARETFQAFRTTDVGRKLIIDQNVFIEGTLPMGVVRPLTEVEMDHYREPFLNPVDREPLWRFPNELPIAGEPANIVALVEEYMDWLHQSPVPKLLFWGTPGVLIPPAEAARLAKSLPNCKAVDVGPGLNLLQEDNPDLIGSEIARWLSTLEISG

SEQ ID NO: 2861 - protein, 277 aa, Synthetic construct
MFHYVDVGPRDGTPVLFLHGNPTSSYVWRNIIPHVAPTHRCIAPDLIGFGKSDKPDLGYFFDDHVRFMDAFIEALGLEEVVLVIHDWGSALGFHWAKRNPERVKGIAFMEFIRPIPTWDEWPEFARETFQAFRTTDVGRKLIIDQNVFIEGTLPMGVVRPLTEVEMDHYREPFLNPVDREPLWRFPNELPIAGEPANIVALVEEYMDWLHQSPVPKLLFWGTPGVLIPPAEAARLAKSLPNCKAVDIGPGLNLLQEDNPDLIGAEIARWLSTLEISG

SEQ ID NO: 2862 - protein, 277 aa, Synthetic construct
MFHYVDVGPRDGTPVLFLHGNPTSSYVWRNIIPHVAPTHRCIAPDLIGMGKSGKPDLGYFFDDHVRFMDAFIEALGLEEVVLVIHDWGSALGFHWAKRNPERVKGIAFMEFIRPIPTWDEWPEFARETFQAFRTTDVGRKLIIDQNVFIEGTLPMGVVRPLTEVEMDHYREPFLNPADREPLWRFPNELPIAGEPANIVALVEEYMDWLHQSPVPKLLFWGTPGVLIPPAEAARLAKSLPNCKAVDIGPGLNLLQEDNPDLIGSEIARWLSTLEISG

SEQ ID NO: 2863 - protein, 277 aa, Synthetic construct
MFHYVDVGPRDGTPVLFLHGNPTSSYVWRNIIPHVAPTHRCIAPDLIGMGKSGKPDLGYFFDDHVRFMDAFIEALGLEEVVLVIHDWGSALGFHWAKRNPERVKGIAFMEFIRPIPTWDEWPEFARETFQAFRTTDVGRKLIIDQNVFIEGTLPMGVVRPLTEVEMDHYREPFLNPVDREPLWRFPNELPIAGEPANVVALVEEYMDWLHQSPVPKLLFWGTPGVLIPPAEAARLAKSLPNCKAVDIGPGLNLLQEDNPDLIGSEIARWLSTLEISG

SEQ ID NO: 2864 - protein, 277 aa, Synthetic construct
MFHYVDVGPRDGTPVLFLHGNPTSSYVWRNIIPHVAPTHRCIAPDLIGMGKSGKPDLGYFFDDHVRFMDAFIEALGLEEVVLVIHDWGSALGFHWAKRNPERVKGIAFMEFIRPIPTWDEWPEFARETFQAFRTTDVGRKLIIDQNVFIEGTLPMGVVRPLTEVEMDHYREPFLNPVDREPLWRFPNELPIAGEPANIVAIVEEYMDWLHQSPVPKLLFWGTPGVLIPPAEAARLAKSLPNCKAVDIGPGLNLLQEDNPDLIGSEIARWLSTLEISG

SEQ ID NO: 2865 - protein, 277 aa, Synthetic construct
MFHYVDVGPRDGTPVLFLHGNPTSSYVWRNIIPHVAPTHRCIAPDLIGMGKSGKPDLGYFFDDHVRFMDAFIEALGLEEVVLVIHDWGSALGFHWAKRNPERVKGIAFMEFIRPIPTWDEWPEFARETFQAFRTTDVGRKLIIDQNVFIEGTLPMGVVRPLTEVEMDHYREPFLNPVDREPLWRFPNELPIAGEPANIVALVDEYMDWLHQSPVPKLLFWGTPGVLIPPAEAARLAKSLPNCKAVDIGPGLNLLQEDNPDLIGSEIARWLSTLEISG

SEQ ID NO: 2866 - protein, 277 aa, Synthetic construct
MFHYVDVGPRDGTPVLFLHGNPTSSYVWRNIIPHVAPTHRCIAPDLIGMGKSGKPDLGYFFDDHVRFMDAFIEALGLEEVVLVIHDWGSALGFHWAKRNPERVKGIAFMEFIRPIPTWDEWPEFARETFQAFRTTDVGRKLIIDQNVFIEGTLPMGVVRPLTEVEMDHYREPFLNPVDREPLWRFPNELPIAGEPANIVALVEEYMDWLHTSPVPKLLFWGTPGVLIPPAEAARLAKSLPNCKAVDIGPGLNLLQEDNPDLIGSEIARWLSTLEISG

SEQ ID NO: 2867 - protein, 277 aa, Synthetic construct
MFHYVDVGPRDGTPVLFLHGNPTSSYVWRNIIPHVAPTHRCIAPDLIGMGKSGKPDLGYFFDDHVRFMDAFIEALGLEEVVLVIHDWGSALGFHWAKRNPERVKGIAFMEFIRPIPTWDEWPEFARETFQAFRTTDVGRKLIIDQNVFIEGTLPMGVVRPLTEVEMDHYREPFLNPVDREPLWRFPNELPIAGEPANIVALVEEYMDWLHQSPVPKLLFWGTPGVLIPPAEAARLAESLPNCKAVDIGPGLNLLQEDNPDLIGSEIARWLSTLEISG

SEQ ID NO: 2868 - protein, 277 aa, Synthetic construct
MFHYVDVGPRDGTPVLFLHGNPTSSYVWRNIIPHVAPTHRCIAPDLIGMGKSGKPDLGYFFDDHVRFMDAFIEALGLEEVVLVIHDWGSALGFHWAKRNPERVKGIAFMEFIRPIPTWDEWPEFARETFQAFRTTDVGRKLIIDQNVFIEGTLPMGVVRPLTEVEMDHYREPFLNPVDREPLWRFPNELPIAGEPANIVALVEEYMDWLHQSPVPKLLFWGTPGVLIPPAEAARLAKTLPNCKAVDIGPGLNLLQEDNPDLIGSEIARWLSTLEISG

SEQ ID NO: 2869 - protein, 277 aa, Synthetic construct
MFHYVDVGPRDGTPVLFLHGNPTSSYVWRNIIPHVAPTHRCIAPDLIGMGKSGKPDLGYFFDDHVRFMDAFIEALGLEEVVLVIHDWGSALGFHWAKRNPERVKGIAFMEFIRPIPTWDEWPEFARETFQAFRTTDVGRKLIIDQNVFIEGTLPMGVVRPLTEVEMDHYREPFLNPVDREPLWRFPNELPIAGEPANIVALVEEYMDWLHQSPVPKLLFWGTPGVLIPPAEAARLAKSLPNCKAVDVGPGLNLLQEDNPDLIGSEIARWLSTLEISG

SEQ ID NO: 2870 - protein, 277 aa, Synthetic construct
MFHYVDVGPRDGTPVLFLHGNPTSSYVWRNIIPHVAPTHRCIAPDLIGMGKSGKPDLGYFFDDHVRFMDAFIEALGLEEVVLVIHDWGSALGFHWAKRNPERVKGIAFMEFIRPIPTWDEWPEFARETFQAFRTTDVGRKLIIDQNVFIEGTLPMGVVRPLTEVEMDHYREPFLNPVDREPLWRFPNELPIAGEPANIVALVEEYMDWLHQSPVPKLLFWGTPGVLIPPAEAARLAKSLPNCKAVDIGPGLNLLQEDNPDLIGAEIARWLSTLEISG

SEQ ID NO: 2871 - protein, 277 aa, Synthetic construct
MFHYVDVGPRDGTPVLFLHGNPTSSYVWRNIIPHVAPTHRCIAPDLIGMGKSDKPDIGYFFDDHVRFMDAFIEALGLEEVVLVIHDWGSALGFHWAKRNPERVKGIAFMEFIRPIPTWDEWPEFARETFQAFRTTDVGRKLIIDQNVFIEGTLPMGVVRPLTEVEMDHYREPFLNPADREPLWRFPNELPIAGEPANIVALVEEYMDWLHQSPVPKLLFWGTPGVLIPPAEAARLAKSLPNCKAVDIGPGLNLLQEDNPDLIGSEIARWLSTLEISG

SEQ ID NO: 2872 - protein, 277 aa, Synthetic construct
MFHYVDVGPRDGTPVLFLHGNPTSSYVWRNIIPHVAPTHRCIAPDLIGMGKSDKPDIGYFFDDHVRFMDAFIEALGLEEVVLVIHDWGSALGFHWAKRNPERVKGIAFMEFIRPIPTWDEWPEFARETFQAFRTTDVGRKLIIDQNVFIEGTLPMGVVRPLTEVEMDHYREPFLNPVDREPLWRFPNELPIAGEPANVVALVEEYMDWLHQSPVPKLLFWGTPGVLIPPAEAARLAKSLPNCKAVDIGPGLNLLQEDNPDLIGSEIARWLSTLEISG

SEQ ID NO: 2873 - protein, 277 aa, Synthetic construct
MFHYVDVGPRDGTPVLFLHGNPTSSYVWRNIIPHVAPTHRCIAPDLIGMGKSDKPDIGYFFDDHVRFMDAFIEALGLEEVVLVIHDWGSALGFHWAKRNPERVKGIAFMEFIRPIPTWDEWPEFARETFQAFRTTDVGRKLIIDQNVFIEGTLPMGVVRPLTEVEMDHYREPFLNPVDREPLWRFPNELPIAGEPANIVAIVEEYMDWLHQSPVPKLLFWGTPGVLIPPAEAARLAKSLPNCKAVDIGPGLNLLQEDNPDLIGSEIARWLSTLEISG

SEQ ID NO: 2874 - protein, 277 aa, Synthetic construct
MFHYVDVGPRDGTPVLFLHGNPTSSYVWRNIIPHVAPTHRCIAPDLIGMGKSDKPDIGYFFDDHVRFMDAFIEALGLEEVVLVIHDWGSALGFHWAKRNPERVKGIAFMEFIRPIPTWDEWPEFARETFQAFRTTDVGRKLIIDQNVFIEGTLPMGVVRPLTEVEMDHYREPFLNPVDREPLWRFPNELPIAGEPANIVALVDEYMDWLHQSPVPKLLFWGTPGVLIPPAEAARLAKSLPNCKAVDIGPGLNLLQEDNPDLIGSEIARWLSTLEISG

SEQ ID NO: 2875 - protein, 277 aa, Synthetic construct
MFHYVDVGPRDGTPVLFLHGNPTSSYVWRNIIPHVAPTHRCIAPDLIGMGKSDKPDIGYFFDDHVRFMDAFIEALGLEEVVLVIHDWGSALGFHWAKRNPERVKGIAFMEFIRPIPTWDEWPEFARETFQAFRTTDVGRKLIIDQNVFIEGTLPMGVVRPLTEVEMDHYREPFLNPVDREPLWRFPNELPIAGEPANIVALVEEYMDWLHTSPVPKLLFWGTPGVLIPPAEAARLAKSLPNCKAVDIGPGLNLLQEDNPDLIGSEIARWLSTLEISG

SEQ ID NO: 2876 - protein, 277 aa, Synthetic construct
MFHYVDVGPRDGTPVLFLHGNPTSSYVWRNIIPHVAPTHRCIAPDLIGMGKSDKPDIGYFFDDHVRFMDAFIEALGLEEVVLVIHDWGSALGFHWAKRNPERVKGIAFMEFIRPIPTWDEWPEFARETFQAFRTTDVGRKLIIDQNVFIEGTLPMGVVRPLTEVEMDHYREPFLNPVDREPLWRFPNELPIAGEPANIVALVEEYMDWLHQSPVPKLLFWGTPGVLIPPAEAARLAESLPNCKAVDIGPGLNLLQEDNPDLIGSEIARWLSTLEISG

SEQ ID NO: 2877 - protein, 277 aa, Synthetic construct
MFHYVDVGPRDGTPVLFLHGNPTSSYVWRNIIPHVAPTHRCIAPDLIGMGKSDKPDIGYFFDDHVRFMDAFIEALGLEEVVLVIHDWGSALGFHWAKRNPERVKGIAFMEFIRPIPTWDEWPEFARETFQAFRTTDVGRKLIIDQNVFIEGTLPMGVVRPLTEVEMDHYREPFLNPVDREPLWRFPNELPIAGEPANIVALVEEYMDWLHQSPVPKLLFWGTPGVLIPPAEAARLAKTLPNCKAVDIGPGLNLLQEDNPDLIGSEIARWLSTLEISG

SEQ ID NO: 2878 - protein, 277 aa, Synthetic construct
MFHYVDVGPRDGTPVLFLHGNPTSSYVWRNIIPHVAPTHRCIAPDLIGMGKSDKPDIGYFFDDHVRFMDAFIEALGLEEVVLVIHDWGSALGFHWAKRNPERVKGIAFMEFIRPIPTWDEWPEFARETFQAFRTTDVGRKLIIDQNVFIEGTLPMGVVRPLTEVEMDHYREPFLNPVDREPLWRFPNELPIAGEPANIVALVEEYMDWLHQSPVPKLLFWGTPGVLIPPAEAARLAKSLPNCKAVDVGPGLNLLQEDNPDLIGSEIARWLSTLEISG

SEQ ID NO: 2879 - protein, 277 aa, Synthetic construct
MFHYVDVGPRDGTPVLFLHGNPTSSYVWRNIIPHVAPTHRCIAPDLIGMGKSDKPDIGYFFDDHVRFMDAFIEALGLEEVVLVIHDWGSALGFHWAKRNPERVKGIAFMEFIRPIPTWDEWPEFARETFQAFRTTDVGRKLIIDQNVFIEGTLPMGVVRPLTEVEMDHYREPFLNPVDREPLWRFPNELPIAGEPANIVALVEEYMDWLHQSPVPKLLFWGTPGVLIPPAEAARLAKSLPNCKAVDIGPGLNLLQEDNPDLIGAEIARWLSTLEISG

SEQ ID NO: 2880 - protein, 277 aa, Synthetic construct
MFHYVDVGPRDGTPVLFLHGNPTSSYVWRNIIPHVAPTHRCIAPDLIGMGKSDKPDLGYFFDDHVRFMDAFIEALGLEEVVLVVHDWGSALGFHWAKRNPERVKGIAFMEFIRPIPTWDEWPEFARETFQAFRTTDVGRKLIIDQNVFIEGTLPMGVVRPLTEVEMDHYREPFLNPADREPLWRFPNELPIAGEPANIVALVEEYMDWLHQSPVPKLLFWGTPGVLIPPAEAARLAKSLPNCKAVDIGPGLNLLQEDNPDLIGSEIARWLSTLEISG

SEQ ID NO: 2881 - protein, 277 aa, Synthetic construct
MFHYVDVGPRDGTPVLFLHGNPTSSYVWRNIIPHVAPTHRCIAPDLIGMGKSDKPDLGYFFDDHVRFMDAFIEALGLEEVVLVVHDWGSALGFHWAKRNPERVKGIAFMEFIRPIPTWDEWPEFARETFQAFRTTDVGRKLIIDQNVFIEGTLPMGVVRPLTEVEMDHYREPFLNPVDREPLWRFPNELPIAGEPANVVALVEEYMDWLHQSPVPKLLFWGTPGVLIPPAEAARLAKSLPNCKAVDIGPGLNLLQEDNPDLIGSEIARWLSTLEISG

SEQ ID NO: 2882 - protein, 277 aa, Synthetic construct
MFHYVDVGPRDGTPVLFLHGNPTSSYVWRNIIPHVAPTHRCIAPDLIGMGKSDKPDLGYFFDDHVRFMDAFIEALGLEEVVLVVHDWGSALGFHWAKRNPERVKGIAFMEFIRPIPTWDEWPEFARETFQAFRTTDVGRKLIIDQNVFIEGTLPMGVVRPLTEVEMDHYREPFLNPVDREPLWRFPNELPIAGEPANIVAIVEEYMDWLHQSPVPKLLFWGTPGVLIPPAEAARLAKSLPNCKAVDIGPGLNLLQEDNPDLIGSEIARWLSTLEISG

SEQ ID NO: 2883 - protein, 277 aa, Synthetic construct
MFHYVDVGPRDGTPVLFLHGNPTSSYVWRNIIPHVAPTHRCIAPDLIGMGKSDKPDLGYFFDDHVRFMDAFIEALGLEEVVLVVHDWGSALGFHWAKRNPERVKGIAFMEFIRPIPTWDEWPEFARETFQAFRTTDVGRKLIIDQNVFIEGTLPMGVVRPLTEVEMDHYREPFLNPVDREPLWRFPNELPIAGEPANIVALVDEYMDWLHQSPVPKLLFWGTPGVLIPPAEAARLAKSLPNCKAVDIGPGLNLLQEDNPDLIGSEIARWLSTLEISG

SEQ ID NO: 2884 - protein, 277 aa, Synthetic construct
MFHYVDVGPRDGTPVLFLHGNPTSSYVWRNIIPHVAPTHRCIAPDLIGMGKSDKPDLGYFFDDHVRFMDAFIEALGLEEVVLVVHDWGSALGFHWAKRNPERVKGIAFMEFIRPIPTWDEWPEFARETFQAFRTTDVGRKLIIDQNVFIEGTLPMGVVRPLTEVEMDHYREPFLNPVDREPLWRFPNELPIAGEPANIVALVEEYMDWLHTSPVPKLLFWGTPGVLIPPAEAARLAKSLPNCKAVDIGPGLNLLQEDNPDLIGSEIARWLSTLEISG

SEQ ID NO: 2885 - protein, 277 aa, Synthetic construct
MFHYVDVGPRDGTPVLFLHGNPTSSYVWRNIIPHVAPTHRCIAPDLIGMGKSDKPDLGYFFDDHVRFMDAFIEALGLEEVVLVVHDWGSALGFHWAKRNPERVKGIAFMEFIRPIPTWDEWPEFARETFQAFRTTDVGRKLIIDQNVFIEGTLPMGVVRPLTEVEMDHYREPFLNPVDREPLWRFPNELPIAGEPANIVALVEEYMDWLHQSPVPKLLFWGTPGVLIPPAEAARLAESLPNCKAVDIGPGLNLLQEDNPDLIGSEIARWLSTLEISG

SEQ ID NO: 2886 - protein, 277 aa, Synthetic construct
MFHYVDVGPRDGTPVLFLHGNPTSSYVWRNIIPHVAPTHRCIAPDLIGMGKSDKPDLGYFFDDHVRFMDAFIEALGLEEVVLVVHDWGSALGFHWAKRNPERVKGIAFMEFIRPIPTWDEWPEFARETFQAFRTTDVGRKLIIDQNVFIEGTLPMGVVRPLTEVEMDHYREPFLNPVDREPLWRFPNELPIAGEPANIVALVEEYMDWLHQSPVPKLLFWGTPGVLIPPAEAARLAKTLPNCKAVDIGPGLNLLQEDNPDLIGSEIARWLSTLEISG

SEQ ID NO: 2887 - protein, 277 aa, Synthetic construct
MFHYVDVGPRDGTPVLFLHGNPTSSYVWRNIIPHVAPTHRCIAPDLIGMGKSDKPDLGYFFDDHVRFMDAFIEALGLEEVVLVVHDWGSALGFHWAKRNPERVKGIAFMEFIRPIPTWDEWPEFARETFQAFRTTDVGRKLIIDQNVFIEGTLPMGVVRPLTEVEMDHYREPFLNPVDREPLWRFPNELPIAGEPANIVALVEEYMDWLHQSPVPKLLFWGTPGVLIPPAEAARLAKSLPNCKAVDVGPGLNLLQEDNPDLIGSEIARWLSTLEISG

SEQ ID NO: 2888 - protein, 277 aa, Synthetic construct
MFHYVDVGPRDGTPVLFLHGNPTSSYVWRNIIPHVAPTHRCIAPDLIGMGKSDKPDLGYFFDDHVRFMDAFIEALGLEEVVLVVHDWGSALGFHWAKRNPERVKGIAFMEFIRPIPTWDEWPEFARETFQAFRTTDVGRKLIIDQNVFIEGTLPMGVVRPLTEVEMDHYREPFLNPVDREPLWRFPNELPIAGEPANIVALVEEYMDWLHQSPVPKLLFWGTPGVLIPPAEAARLAKSLPNCKAVDIGPGLNLLQEDNPDLIGAEIARWLSTLEISG

SEQ ID NO: 2889 - protein, 277 aa, Synthetic construct
MFHYVDVGPRDGTPVLFLHGNPTSSYVWRNIIPHVAPTHRCIAPDLIGMGKSDKPDLGYFFDDHVRFMDAFIEALGLEEVVLVIHDWGSALGFHWAKRNPERVKGIAFMEFIRPIPTWDDWPEFARETFQAFRTTDVGRKLIIDQNVFIEGTLPMGVVRPLTEVEMDHYREPFLNPADREPLWRFPNELPIAGEPANIVALVEEYMDWLHQSPVPKLLFWGTPGVLIPPAEAARLAKSLPNCKAVDIGPGLNLLQEDNPDLIGSEIARWLSTLEISG

SEQ ID NO: 2890 - protein, 277 aa, Synthetic construct
MFHYVDVGPRDGTPVLFLHGNPTSSYVWRNIIPHVAPTHRCIAPDLIGMGKSDKPDLGYFFDDHVRFMDAFIEALGLEEVVLVIHDWGSALGFHWAKRNPERVKGIAFMEFIRPIPTWDDWPEFARETFQAFRTTDVGRKLIIDQNVFIEGTLPMGVVRPLTEVEMDHYREPFLNPVDREPLWRFPNELPIAGEPANVVALVEEYMDWLHQSPVPKLLFWGTPGVLIPPAEAARLAKSLPNCKAVDIGPGLNLLQEDNPDLIGSEIARWLSTLEISG

SEQ ID NO: 2891 - protein, 277 aa, Synthetic construct
MFHYVDVGPRDGTPVLFLHGNPTSSYVWRNIIPHVAPTHRCIAPDLIGMGKSDKPDLGYFFDDHVRFMDAFIEALGLEEVVLVIHDWGSALGFHWAKRNPERVKGIAFMEFIRPIPTWDDWPEFARETFQAFRTTDVGRKLIIDQNVFIEGTLPMGVVRPLTEVEMDHYREPFLNPVDREPLWRFPNELPIAGEPANIVAIVEEYMDWLHQSPVPKLLFWGTPGVLIPPAEAARLAKSLPNCKAVDIGPGLNLLQEDNPDLIGSEIARWLSTLEISG

SEQ ID NO: 2892 - protein, 277 aa, Synthetic construct
MFHYVDVGPRDGTPVLFLHGNPTSSYVWRNIIPHVAPTHRCIAPDLIGMGKSDKPDLGYFFDDHVRFMDAFIEALGLEEVVLVIHDWGSALGFHWAKRNPERVKGIAFMEFIRPIPTWDDWPEFARETFQAFRTTDVGRKLIIDQNVFIEGTLPMGVVRPLTEVEMDHYREPFLNPVDREPLWRFPNELPIAGEPANIVALVDEYMDWLHQSPVPKLLFWGTPGVLIPPAEAARLAKSLPNCKAVDIGPGLNLLQEDNPDLIGSEIARWLSTLEISG

SEQ ID NO: 2893 - protein, 277 aa, Synthetic construct
MFHYVDVGPRDGTPVLFLHGNPTSSYVWRNIIPHVAPTHRCIAPDLIGMGKSDKPDLGYFFDDHVRFMDAFIEALGLEEVVLVIHDWGSALGFHWAKRNPERVKGIAFMEFIRPIPTWDDWPEFARETFQAFRTTDVGRKLIIDQNVFIEGTLPMGVVRPLTEVEMDHYREPFLNPVDREPLWRFPNELPIAGEPANIVALVEEYMDWLHTSPVPKLLFWGTPGVLIPPAEAARLAKSLPNCKAVDIGPGLNLLQEDNPDLIGSEIARWLSTLEISG

SEQ ID NO: 2894 - protein, 277 aa, Synthetic construct
MFHYVDVGPRDGTPVLFLHGNPTSSYVWRNIIPHVAPTHRCIAPDLIGMGKSDKPDLGYFFDDHVRFMDAFIEALGLEEVVLVIHDWGSALGFHWAKRNPERVKGIAFMEFIRPIPTWDDWPEFARETFQAFRTTDVGRKLIIDQNVFIEGTLPMGVVRPLTEVEMDHYREPFLNPVDREPLWRFPNELPIAGEPANIVALVEEYMDWLHQSPVPKLLFWGTPGVLIPPAEAARLAESLPNCKAVDIGPGLNLLQEDNPDLIGSEIARWLSTLEISG

SEQ ID NO: 2895 - protein, 277 aa, Synthetic construct
MFHYVDVGPRDGTPVLFLHGNPTSSYVWRNIIPHVAPTHRCIAPDLIGMGKSDKPDLGYFFDDHVRFMDAFIEALGLEEVVLVIHDWGSALGFHWAKRNPERVKGIAFMEFIRPIPTWDDWPEFARETFQAFRTTDVGRKLIIDQNVFIEGTLPMGVVRPLTEVEMDHYREPFLNPVDREPLWRFPNELPIAGEPANIVALVEEYMDWLHQSPVPKLLFWGTPGVLIPPAEAARLAKTLPNCKAVDIGPGLNLLQEDNPDLIGSEIARWLSTLEISG

SEQ ID NO: 2896 - protein, 277 aa, Synthetic construct
MFHYVDVGPRDGTPVLFLHGNPTSSYVWRNIIPHVAPTHRCIAPDLIGMGKSDKPDLGYFFDDHVRFMDAFIEALGLEEVVLVIHDWGSALGFHWAKRNPERVKGIAFMEFIRPIPTWDDWPEFARETFQAFRTTDVGRKLIIDQNVFIEGTLPMGVVRPLTEVEMDHYREPFLNPVDREPLWRFPNELPIAGEPANIVALVEEYMDWLHQSPVPKLLFWGTPGVLIPPAEAARLAKSLPNCKAVDVGPGLNLLQEDNPDLIGSEIARWLSTLEISG

SEQ ID NO: 2897 - protein, 277 aa, Synthetic construct
MFHYVDVGPRDGTPVLFLHGNPTSSYVWRNIIPHVAPTHRCIAPDLIGMGKSDKPDLGYFFDDHVRFMDAFIEALGLEEVVLVIHDWGSALGFHWAKRNPERVKGIAFMEFIRPIPTWDDWPEFARETFQAFRTTDVGRKLIIDQNVFIEGTLPMGVVRPLTEVEMDHYREPFLNPVDREPLWRFPNELPIAGEPANIVALVEEYMDWLHQSPVPKLLFWGTPGVLIPPAEAARLAKSLPNCKAVDIGPGLNLLQEDNPDLIGAEIARWLSTLEISG

SEQ ID NO: 2898 - protein, 277 aa, Synthetic construct
MFHYVDVGPRDGTPVLFLHGNPTSSYVWRNIIPHVAPTHRCIAPDLIGMGKSDKPDLGYFFDDHVRFMDAFIEALGLEEVVLVIHDWGSALGFHWAKRNPERVKGIAFMEFIRPIPTWDEFPEFARETFQAFRTTDVGRKLIIDQNVFIEGTLPMGVVRPLTEVEMDHYREPFLNPADREPLWRFPNELPIAGEPANIVALVEEYMDWLHQSPVPKLLFWGTPGVLIPPAEAARLAKSLPNCKAVDIGPGLNLLQEDNPDLIGSEIARWLSTLEISG

SEQ ID NO: 2899 - protein, 277 aa, Synthetic construct
MFHYVDVGPRDGTPVLFLHGNPTSSYVWRNIIPHVAPTHRCIAPDLIGMGKSDKPDLGYFFDDHVRFMDAFIEALGLEEVVLVIHDWGSALGFHWAKRNPERVKGIAFMEFIRPIPTWDEFPEFARETFQAFRTTDVGRKLIIDQNVFIEGTLPMGVVRPLTEVEMDHYREPFLNPVDREPLWRFPNELPIAGEPANVVALVEEYMDWLHQSPVPKLLFWGTPGVLIPPAEAARLAKSLPNCKAVDIGPGLNLLQEDNPDLIGSEIARWLSTLEISG

SEQ ID NO: 2900 - protein, 277 aa, Synthetic construct
MFHYVDVGPRDGTPVLFLHGNPTSSYVWRNIIPHVAPTHRCIAPDLIGMGKSDKPDLGYFFDDHVRFMDAFIEALGLEEVVLVIHDWGSALGFHWAKRNPERVKGIAFMEFIRPIPTWDEFPEFARETFQAFRTTDVGRKLIIDQNVFIEGTLPMGVVRPLTEVEMDHYREPFLNPVDREPLWRFPNELPIAGEPANIVAIVEEYMDWLHQSPVPKLLFWGTPGVLIPPAEAARLAKSLPNCKAVDIGPGLNLLQEDNPDLIGSEIARWLSTLEISG

SEQ ID NO: 2901 - protein, 277 aa, Synthetic construct
MFHYVDVGPRDGTPVLFLHGNPTSSYVWRNIIPHVAPTHRCIAPDLIGMGKSDKPDLGYFFDDHVRFMDAFIEALGLEEVVLVIHDWGSALGFHWAKRNPERVKGIAFMEFIRPIPTWDEFPEFARETFQAFRTTDVGRKLIIDQNVFIEGTLPMGVVRPLTEVEMDHYREPFLNPVDREPLWRFPNELPIAGEPANIVALVDEYMDWLHQSPVPKLLFWGTPGVLIPPAEAARLAKSLPNCKAVDIGPGLNLLQEDNPDLIGSEIARWLSTLEISG

SEQ ID NO: 2902 - protein, 277 aa, Synthetic construct
MFHYVDVGPRDGTPVLFLHGNPTSSYVWRNIIPHVAPTHRCIAPDLIGMGKSDKPDLGYFFDDHVRFMDAFIEALGLEEVVLVIHDWGSALGFHWAKRNPERVKGIAFMEFIRPIPTWDEFPEFARETFQAFRTTDVGRKLIIDQNVFIEGTLPMGVVRPLTEVEMDHYREPFLNPVDREPLWRFPNELPIAGEPANIVALVEEYMDWLHTSPVPKLLFWGTPGVLIPPAEAARLAKSLPNCKAVDIGPGLNLLQEDNPDLIGSEIARWLSTLEISG

SEQ ID NO: 2903 - protein, 277 aa, Synthetic construct
MFHYVDVGPRDGTPVLFLHGNPTSSYVWRNIIPHVAPTHRCIAPDLIGMGKSDKPDLGYFFDDHVRFMDAFIEALGLEEVVLVIHDWGSALGFHWAKRNPERVKGIAFMEFIRPIPTWDEFPEFARETFQAFRTTDVGRKLIIDQNVFIEGTLPMGVVRPLTEVEMDHYREPFLNPVDREPLWRFPNELPIAGEPANIVALVEEYMDWLHQSPVPKLLFWGTPGVLIPPAEAARLAESLPNCKAVDIGPGLNLLQEDNPDLIGSEIARWLSTLEISG

SEQ ID NO: 2904 - protein, 277 aa, Synthetic construct
MFHYVDVGPRDGTPVLFLHGNPTSSYVWRNIIPHVAPTHRCIAPDLIGMGKSDKPDLGYFFDDHVRFMDAFIEALGLEEVVLVIHDWGSALGFHWAKRNPERVKGIAFMEFIRPIPTWDEFPEFARETFQAFRTTDVGRKLIIDQNVFIEGTLPMGVVRPLTEVEMDHYREPFLNPVDREPLWRFPNELPIAGEPANIVALVEEYMDWLHQSPVPKLLFWGTPGVLIPPAEAARLAKTLPNCKAVDIGPGLNLLQEDNPDLIGSEIARWLSTLEISG

SEQ ID NO: 2905 - protein, 277 aa, Synthetic construct
MFHYVDVGPRDGTPVLFLHGNPTSSYVWRNIIPHVAPTHRCIAPDLIGMGKSDKPDLGYFFDDHVRFMDAFIEALGLEEVVLVIHDWGSALGFHWAKRNPERVKGIAFMEFIRPIPTWDEFPEFARETFQAFRTTDVGRKLIIDQNVFIEGTLPMGVVRPLTEVEMDHYREPFLNPVDREPLWRFPNELPIAGEPANIVALVEEYMDWLHQSPVPKLLFWGTPGVLIPPAEAARLAKSLPNCKAVDVGPGLNLLQEDNPDLIGSEIARWLSTLEISG

SEQ ID NO: 2906 - protein, 277 aa, Synthetic construct
MFHYVDVGPRDGTPVLFLHGNPTSSYVWRNIIPHVAPTHRCIAPDLIGMGKSDKPDLGYFFDDHVRFMDAFIEALGLEEVVLVIHDWGSALGFHWAKRNPERVKGIAFMEFIRPIPTWDEFPEFARETFQAFRTTDVGRKLIIDQNVFIEGTLPMGVVRPLTEVEMDHYREPFLNPVDREPLWRFPNELPIAGEPANIVALVEEYMDWLHQSPVPKLLFWGTPGVLIPPAEAARLAKSLPNCKAVDIGPGLNLLQEDNPDLIGAEIARWLSTLEISG

SEQ ID NO: 2907 - protein, 277 aa, Synthetic construct
MFHYVDVGPRDGTPVLFLHGNPTSSYVWRNIIPHVAPTHRCIAPDLIGMGKSDKPDLGYFFDDHVRFMDAFIEALGLEEVVLVIHDWGSALGFHWAKRNPERVKGIAFMEFIRPIPTWDEWPEFARETFQAFRTTDVGRELIIDQNVFIEGTLPMGVVRPLTEVEMDHYREPFLNPADREPLWRFPNELPIAGEPANIVALVEEYMDWLHQSPVPKLLFWGTPGVLIPPAEAARLAKSLPNCKAVDIGPGLNLLQEDNPDLIGSEIARWLSTLEISG

SEQ ID NO: 2908 - protein, 277 aa, Synthetic construct
MFHYVDVGPRDGTPVLFLHGNPTSSYVWRNIIPHVAPTHRCIAPDLIGMGKSDKPDLGYFFDDHVRFMDAFIEALGLEEVVLVIHDWGSALGFHWAKRNPERVKGIAFMEFIRPIPTWDEWPEFARETFQAFRTTDVGRELIIDQNVFIEGTLPMGVVRPLTEVEMDHYREPFLNPVDREPLWRFPNELPIAGEPANVVALVEEYMDWLHQSPVPKLLFWGTPGVLIPPAEAARLAKSLPNCKAVDIGPGLNLLQEDNPDLIGSEIARWLSTLEISG

SEQ ID NO: 2909 - protein, 277 aa, Synthetic construct
MFHYVDVGPRDGTPVLFLHGNPTSSYVWRNIIPHVAPTHRCIAPDLIGMGKSDKPDLGYFFDDHVRFMDAFIEALGLEEVVLVIHDWGSALGFHWAKRNPERVKGIAFMEFIRPIPTWDEWPEFARETFQAFRTTDVGRELIIDQNVFIEGTLPMGVVRPLTEVEMDHYREPFLNPVDREPLWRFPNELPIAGEPANIVAIVEEYMDWLHQSPVPKLLFWGTPGVLIPPAEAARLAKSLPNCKAVDIGPGLNLLQEDNPDLIGSEIARWLSTLEISG

SEQ ID NO: 2910 - protein, 277 aa, Synthetic construct
MFHYVDVGPRDGTPVLFLHGNPTSSYVWRNIIPHVAPTHRCIAPDLIGMGKSDKPDLGYFFDDHVRFMDAFIEALGLEEVVLVIHDWGSALGFHWAKRNPERVKGIAFMEFIRPIPTWDEWPEFARETFQAFRTTDVGRELIIDQNVFIEGTLPMGVVRPLTEVEMDHYREPFLNPVDREPLWRFPNELPIAGEPANIVALVDEYMDWLHQSPVPKLLFWGTPGVLIPPAEAARLAKSLPNCKAVDIGPGLNLLQEDNPDLIGSEIARWLSTLEISG

SEQ ID NO: 2911 - protein, 277 aa, Synthetic construct
MFHYVDVGPRDGTPVLFLHGNPTSSYVWRNIIPHVAPTHRCIAPDLIGMGKSDKPDLGYFFDDHVRFMDAFIEALGLEEVVLVIHDWGSALGFHWAKRNPERVKGIAFMEFIRPIPTWDEWPEFARETFQAFRTTDVGRELIIDQNVFIEGTLPMGVVRPLTEVEMDHYREPFLNPVDREPLWRFPNELPIAGEPANIVALVEEYMDWLHTSPVPKLLFWGTPGVLIPPAEAARLAKSLPNCKAVDIGPGLNLLQEDNPDLIGSEIARWLSTLEISG

SEQ ID NO: 2912 - protein, 277 aa, Synthetic construct
MFHYVDVGPRDGTPVLFLHGNPTSSYVWRNIIPHVAPTHRCIAPDLIGMGKSDKPDLGYFFDDHVRFMDAFIEALGLEEVVLVIHDWGSALGFHWAKRNPERVKGIAFMEFIRPIPTWDEWPEFARETFQAFRTTDVGRELIIDQNVFIEGTLPMGVVRPLTEVEMDHYREPFLNPVDREPLWRFPNELPIAGEPANIVALVEEYMDWLHQSPVPKLLFWGTPGVLIPPAEAARLAESLPNCKAVDIGPGLNLLQEDNPDLIGSEIARWLSTLEISG

SEQ ID NO: 2913 - protein, 277 aa, Synthetic construct
MFHYVDVGPRDGTPVLFLHGNPTSSYVWRNIIPHVAPTHRCIAPDLIGMGKSDKPDLGYFFDDHVRFMDAFIEALGLEEVVLVIHDWGSALGFHWAKRNPERVKGIAFMEFIRPIPTWDEWPEFARETFQAFRTTDVGRELIIDQNVFIEGTLPMGVVRPLTEVEMDHYREPFLNPVDREPLWRFPNELPIAGEPANIVALVEEYMDWLHQSPVPKLLFWGTPGVLIPPAEAARLAKTLPNCKAVDIGPGLNLLQEDNPDLIGSEIARWLSTLEISG

SEQ ID NO: 2914 - protein, 277 aa, Synthetic construct
MFHYVDVGPRDGTPVLFLHGNPTSSYVWRNIIPHVAPTHRCIAPDLIGMGKSDKPDLGYFFDDHVRFMDAFIEALGLEEVVLVIHDWGSALGFHWAKRNPERVKGIAFMEFIRPIPTWDEWPEFARETFQAFRTTDVGRELIIDQNVFIEGTLPMGVVRPLTEVEMDHYREPFLNPVDREPLWRFPNELPIAGEPANIVALVEEYMDWLHQSPVPKLLFWGTPGVLIPPAEAARLAKSLPNCKAVDVGPGLNLLQEDNPDLIGSEIARWLSTLEISG

SEQ ID NO: 2915 - protein, 277 aa, Synthetic construct
MFHYVDVGPRDGTPVLFLHGNPTSSYVWRNIIPHVAPTHRCIAPDLIGMGKSDKPDLGYFFDDHVRFMDAFIEALGLEEVVLVIHDWGSALGFHWAKRNPERVKGIAFMEFIRPIPTWDEWPEFARETFQAFRTTDVGRELIIDQNVFIEGTLPMGVVRPLTEVEMDHYREPFLNPVDREPLWRFPNELPIAGEPANIVALVEEYMDWLHQSPVPKLLFWGTPGVLIPPAEAARLAKSLPNCKAVDIGPGLNLLQEDNPDLIGAEIARWLSTLEISG

SEQ ID NO: 2916 - protein, 277 aa, Synthetic construct
MFHYVDEGPRDGTPVLFLHGNPTSSYVWRNIIPHVAPTHRCIAPDLIGMGKSDKPDLGYFFDDHVRFMDAFIEALGLEEVVLVIHDWGSALGFHWAKRNPERVKGIAFMEFIRPIPTWDEWPEFARETFQAFRTTDVGRKLIIDQNVFIEGTLPMGVVRPLTEVEMDHYREPFLNPVDREPLWRFPNELPIAGEPANIVALVEEYMDWLHQSPVPKLLFWGTPGVLIPPAEAARLAKTLPNCKAVDIGPGLNLLQEDNPDLIGAEIARWLSTLEISG

SEQ ID NO: 2917 - protein, 277 aa, Synthetic construct
MFHYVDEGPRDGTPVLFLHGNPTSSYVWRNIIPHVAPTHRCIAPDLIGMGKSGKPDLGYFFDDHVRFMDAFIEALGLEEVVLVIHDWGSALGFHWAKRNPERVKGIAFMEFIRPIPTWDEWPEFARETFQAFRTTDVGRKLIIDQNVFIEGTLPMGVVRPLTEVEMDHYREPFLNPVDREPLWRFPNELPIAGEPANIVALVEEYMDWLHQSPVPKLLFWGTPGVLIPPAEAARLAKTLPNCKAVDIGPGLNLLQEDNPDLIGSEIARWLSTLEISG

SEQ ID NO: 2918 - protein, 277 aa, Synthetic construct
MFHYVDEGPRDGTPVLFLHGNPTSSYVWRNIIPHVAPTHRCIAPDLIGMGKSDKPDLGYFFDDHVRFMDAFIEALGLEEVVLVIHDWGSALGFHWAKRNPERVKGIAFMEFIRPIPTWDEWPEFARETFQAFRTTDVGRKLIIDQNVFIEGTLPMGVVRPLTEVEMDHYREPFLNPADREPLWRFPNELPIAGEPANIVALVEEYMDWLHQSPVPKLLFWGTPGVLIPPAEAARLAKTLPNCKAVDIGPGLNLLQEDNPDLIGSEIARWLSTLEISG

SEQ ID NO: 2919 - protein, 277 aa, Synthetic construct
MFHYVDEGPRDGTPVLFLHGNPTSSYVWRNIIPHVAPTHRCIAPDLIGMGKSDKPDLGYFFDDHVRFMDAFIEALGLEEVVLVIHDWGSALGFHWAKRNPERVKGIAFMEFIRPIPTWDEFPEFARETFQAFRTTDVGRKLIIDQNVFIEGTLPMGVVRPLTEVEMDHYREPFLNPVDREPLWRFPNELPIAGEPANIVALVEEYMDWLHQSPVPKLLFWGTPGVLIPPAEAARLAKTLPNCKAVDIGPGLNLLQEDNPDLIGSEIARWLSTLEISG

SEQ ID NO: 2920 - protein, 277 aa, Synthetic construct
MFHYVDEGPRDGTPVLFLHGNPTSSYVWRNIIPHVAPTHRCIAPDLIGMGKSDKPDLGYFFDDHVRFMDAFIEALGLEEVVLVIHDWGSALGFHWAKRNPERVKGIAFMEFIRPIPTWDEWPEFARETFQAFRTTDVGRKLIIDQNVFIEGTLPMGVVRPLTEVEMDHYREPFLNPVDREPLWRFPNELPIAGEPANVVALVEEYMDWLHQSPVPKLLFWGTPGVLIPPAEAARLAKTLPNCKAVDIGPGLNLLQEDNPDLIGSEIARWLSTLEISG

SEQ ID NO: 2921 - protein, 277 aa, Synthetic construct
MFHYVDEGPRDGTPVLFLHGNPTSSYVWRNIIPHVAPTHRCIAPDLIGMGKSGKPDLGYFFDDHVRFMDAFIEALGLEEVVLVIHDWGSALGFHWAKRNPERVKGIAFMEFIRPIPTWDEWPEFARETFQAFRTTDVGRKLIIDQNVFIEGTLPMGVVRPLTEVEMDHYREPFLNPADREPLWRFPNELPIAGEPANIVALVEEYMDWLHQSPVPKLLFWGTPGVLIPPAEAARLAKTLPNCKAVDIGPGLNLLQEDNPDLIGSEIARWLSTLEISG

SEQ ID NO: 2922 - protein, 277 aa, Synthetic construct
MFHYVDEGPRDGTPVLFLHGNPTSSYVWRNIIPHVAPTHRCIAPDLIGMGKSDKPDLGYFFDDHVRFMDAFIEALGLEEVVLVIHDWGSALGFHWAKRNPERVKGIAFMEFIRPIPTWDEFPEFARETFQAFRTTDVGRKLIIDQNVFIEGTLPMGVVRPLTEVEMDHYREPFLNPVDREPLWRFPNELPIAGEPANVVALVEEYMDWLHQSPVPKLLFWGTPGVLIPPAEAARLAKTLPNCKAVDIGPGLNLLQEDNPDLIGSEIARWLSTLEISG

SEQ ID NO: 2923 - protein, 277 aa, Synthetic construct
MFHYVDEGPRDGTPVLFLHGNPTSSYVWRNIIPHVAPTHRCIAPDLIGMGKSGKPDLGYFFDDHVRFMDAFIEALGLEEVVLVIHDWGSALGFHWAKRNPERVKGIAFMEFIRPIPTWDEWPEFARETFQAFRTTDVGRKLIIDQNVFIEGTLPMGVVRPLTEVEMDHYREPFLNPVDREPLWRFPNELPIAGEPANIVALVEEYMDWLHQSPVPKLLFWGTPGVLIPPAEAARLAKSLPNCKAVDIGPGLNLLQEDNPDLIGAEIARWLSTLEISG

SEQ ID NO: 2924 - protein, 277 aa, Synthetic construct
MFHYVDEGPRDGTPVLFLHGNPTSSYVWRNIIPHVAPTHRCIAPDLIGMGKSDKPDLGYFFDDHVRFMDAFIEALGLEEVVLVIHDWGSALGFHWAKRNPERVKGIAFMEFIRPIPTWDEWPEFARETFQAFRTTDVGRKLIIDQNVFIEGTLPMGVVRPLTEVEMDHYREPFLNPADREPLWRFPNELPIAGEPANIVALVEEYMDWLHQSPVPKLLFWGTPGVLIPPAEAARLAKSLPNCKAVDIGPGLNLLQEDNPDLIGAEIARWLSTLEISG

SEQ ID NO: 2925 - protein, 277 aa, Synthetic construct
MFHYVDEGPRDGTPVLFLHGNPTSSYVWRNIIPHVAPTHRCIAPDLIGMGKSDKPDLGYFFDDHVRFMDAFIEALGLEEVVLVIHDWGSALGFHWAKRNPERVKGIAFMEFIRPIPTWDEFPEFARETFQAFRTTDVGRKLIIDQNVFIEGTLPMGVVRPLTEVEMDHYREPFLNPVDREPLWRFPNELPIAGEPANIVALVEEYMDWLHQSPVPKLLFWGTPGVLIPPAEAARLAKSLPNCKAVDIGPGLNLLQEDNPDLIGAEIARWLSTLEISG

SEQ ID NO: 2926 - protein, 277 aa, Synthetic construct
MFHYVDEGPRDGTPVLFLHGNPTSSYVWRNIIPHVAPTHRCIAPDLIGMGKSDKPDLGYFFDDHVRFMDAFIEALGLEEVVLVIHDWGSALGFHWAKRNPERVKGIAFMEFIRPIPTWDEWPEFARETFQAFRTTDVGRKLIIDQNVFIEGTLPMGVVRPLTEVEMDHYREPFLNPVDREPLWRFPNELPIAGEPANVVALVEEYMDWLHQSPVPKLLFWGTPGVLIPPAEAARLAKSLPNCKAVDIGPGLNLLQEDNPDLIGAEIARWLSTLEISG

SEQ ID NO: 2927 - protein, 277 aa, Synthetic construct
MFHYVDEGPRDGTPVLFLHGNPTSSYVWRNIIPHVAPTHRCIAPDLIGMGKSGKPDLGYFFDDHVRFMDAFIEALGLEEVVLVIHDWGSALGFHWAKRNPERVKGIAFMEFIRPIPTWDEWPEFARETFQAFRTTDVGRKLIIDQNVFIEGTLPMGVVRPLTEVEMDHYREPFLNPADREPLWRFPNELPIAGEPANIVALVEEYMDWLHQSPVPKLLFWGTPGVLIPPAEAARLAKSLPNCKAVDIGPGLNLLQEDNPDLIGAEIARWLSTLEISG

SEQ ID NO: 2928 - protein, 277 aa, Synthetic construct
MFHYVDEGPRDGTPVLFLHGNPTSSYVWRNIIPHVAPTHRCIAPDLIGMGKSDKPDLGYFFDDHVRFMDAFIEALGLEEVVLVIHDWGSALGFHWAKRNPERVKGIAFMEFIRPIPTWDEFPEFARETFQAFRTTDVGRKLIIDQNVFIEGTLPMGVVRPLTEVEMDHYREPFLNPVDREPLWRFPNELPIAGEPANVVALVEEYMDWLHQSPVPKLLFWGTPGVLIPPAEAARLAKSLPNCKAVDIGPGLNLLQEDNPDLIGAEIARWLSTLEISG

SEQ ID NO: 2929 - protein, 277 aa, Synthetic construct
MFHYVDEGPRDGTPVLFLHGNPTSSYVWRNIIPHVAPTHRCIAPDLIGMGKSGKPDLGYFFDDHVRFMDAFIEALGLEEVVLVIHDWGSALGFHWAKRNPERVKGIAFMEFIRPIPTWDEWPEFARETFQAFRTTDVGRKLIIDQNVFIEGTLPMGVVRPLTEVEMDHYREPFLNPADREPLWRFPNELPIAGEPANIVALVEEYMDWLHQSPVPKLLFWGTPGVLIPPAEAARLAKSLPNCKAVDIGPGLNLLQEDNPDLIGSEIARWLSTLEISG

SEQ ID NO: 2930 - protein, 277 aa, Synthetic construct
MFHYVDVGPRDGTPVLFLHGNPTSSYVWRNIIPHVAPTHRCIAPDLIGMGKSGKPDLGYFFDDHVRFMDAFIEALGLEEVVLVIHDWGSALGFHWAKRNPERVKGIAFMEFIRPIPTWDEWPEFARETFQAFRTTDVGRKLIIDQNVFIEGTLPMGVVRPLTEVEMDHYREPFLNPADREPLWRFPNELPIAGEPANIVALVEEYMDWLHQSPVPKLLFWGTPGVLIPPAEAARLAKTLPNCKAVDIGPGLNLLQEDNPDLIGSEIARWLSTLEISG

SEQ ID NO: 2931 - protein, 277 aa, Synthetic construct
MFHYVDVGPRDGTPVLFLHGNPTSSYVWRNIIPHVAPTHRCIAPDLIGMGKSGKPDLGYFFDDHVRFMDAFIEALGLEEVVLVIHDWGSALGFHWAKRNPERVKGIAFMEFIRPIPTWDEWPEFARETFQAFRTTDVGRKLIIDQNVFIEGTLPMGVVRPLTEVEMDHYREPFLNPADREPLWRFPNELPIAGEPANIVALVEEYMDWLHQSPVPKLLFWGTPGVLIPPAEAARLAKSLPNCKAVDIGPGLNLLQEDNPDLIGAEIARWLSTLEISG

SEQ ID NO: 2932 - protein, 277 aa, Synthetic construct
MFHYVDVGPRDGTPVLFLHGNPTSSYVWRNIIPHVAPTHRCIAPDLIGMGKSGKPDLGYFFDDHVRFMDAFIEALGLEEVVLVIHDWGSALGFHWAKRNPERVKGIAFMEFIRPIPTWDEFPEFARETFQAFRTTDVGRKLIIDQNVFIEGTLPMGVVRPLTEVEMDHYREPFLNPADREPLWRFPNELPIAGEPANIVALVEEYMDWLHQSPVPKLLFWGTPGVLIPPAEAARLAKSLPNCKAVDIGPGLNLLQEDNPDLIGSEIARWLSTLEISG

SEQ ID NO: 2933 - protein, 277 aa, Synthetic construct
MFHYVDVGPRDGTPVLFLHGNPTSSYVWRNIIPHVAPTHRCIAPDLIGMGKSGKPDLGYFFDDHVRFMDAFIEALGLEEVVLVIHDWGSALGFHWAKRNPERVKGIAFMEFIRPIPTWDEWPEFARETFQAFRTTDVGRKLIIDQNVFIEGTLPMGVVRPLTEVEMDHYREPFLNPADREPLWRFPNELPIAGEPANVVALVEEYMDWLHQSPVPKLLFWGTPGVLIPPAEAARLAKSLPNCKAVDIGPGLNLLQEDNPDLIGSEIARWLSTLEISG

SEQ ID NO: 2934 - protein, 277 aa, Synthetic construct
MFHYVDVGPRDGTPVLFLHGNPTSSYVWRNIIPHVAPTHRCIAPDLIGMGKSGKPDLGYFFDDHVRFMDAFIEALGLEEVVLVIHDWGSALGFHWAKRNPERVKGIAFMEFIRPIPTWDEFPEFARETFQAFRTTDVGRKLIIDQNVFIEGTLPMGVVRPLTEVEMDHYREPFLNPADREPLWRFPNELPIAGEPANVVALVEEYMDWLHQSPVPKLLFWGTPGVLIPPAEAARLAKSLPNCKAVDIGPGLNLLQEDNPDLIGSEIARWLSTLEISG

SEQ ID NO: 2935 - protein, 277 aa, Synthetic construct
MFHYVDVGPRDGTPVLFLHGNPTSSYVWRNIIPHVAPTHRCIAPDLIGMGKSGKPDLGYFFDDHVRFMDAFIEALGLEEVVLVIHDWGSALGFHWAKRNPERVKGIAFMEFIRPIPTWDEWPEFARETFQAFRTTDVGRKLIIDQNVFIEGTLPMGVVRPLTEVEMDHYREPFLNPADREPLWRFPNELPIAGEPANIVALVEEYMDWLHQSPVPKLLFWGTPGVLIPPAEAARLAKTLPNCKAVDIGPGLNLLQEDNPDLIGAEIARWLSTLEISG

SEQ ID NO: 2936 - protein, 277 aa, Synthetic construct
MFHYVDEGPRDGTPVLFLHGNPTSSYVWRNIIPHVAPTHRCIAPDLIGMGKSDKPDLGYFFDDHVRFMDAFIEALGLEEVVLVIHDWGSALGFHWAKRNPERVKGIAFMEFIRPIPTWDEFPEFARETFQAFRTTDVGRKLIIDQNVFIEGTLPMGVVRPLTEVEMDHYREPFLNPVDREPLWRFPNELPIAGEPANVVALVEEYMDWLHQSPVPKLLFWGTPGVLIPPAEAARLAKSLPNCKAVDIGPGLNLLQEDNPDLIGSEIARWLSTLEISG

SEQ ID NO: 2937 - protein, 277 aa, Synthetic construct
MFHYVDVGPRDGTPVLFLHGNPTSSYVWRNIIPHVAPTHRCIAPDLIGMGKSDKPDLGYFFDDHVRFMDAFIEALGLEEVVLVIHDWGSALGFHWAKRNPERVKGIAFMEFIRPIPTWDEFPEFARETFQAFRTTDVGRKLIIDQNVFIEGTLPMGVVRPLTEVEMDHYREPFLNPVDREPLWRFPNELPIAGEPANVVALVEEYMDWLHQSPVPKLLFWGTPGVLIPPAEAARLAKSLPNCKAVDIGPGLNLLQEDNPDLIGAEIARWLSTLEISG

SEQ ID NO: 2938 - protein, 277 aa, Synthetic construct
MFHYVDVGPRDGTPVLFLHGNPTSSYVWRNIIPHVAPTHRCIAPDLIGMGKSGKPDLGYFFDDHVRFMDAFIEALGLEEVVLVIHDWGSALGFHWAKRNPERVKGIAFMEFIRPIPTWDEFPEFARETFQAFRTTDVGRKLIIDQNVFIEGTLPMGVVRPLTEVEMDHYREPFLNPVDREPLWRFPNELPIAGEPANVVALVEEYMDWLHQSPVPKLLFWGTPGVLIPPAEAARLAKSLPNCKAVDIGPGLNLLQEDNPDLIGSEIARWLSTLEISG

SEQ ID NO: 2939 - protein, 277 aa, Synthetic construct
MFHYVDVGPRDGTPVLFLHGNPTSSYVWRNIIPHVAPTHRCIAPDLIGMGKSDKPDLGYFFDDHVRFMDAFIEALGLEEVVLVIHDWGSALGFHWAKRNPERVKGIAFMEFIRPIPTWDEFPEFARETFQAFRTTDVGRKLIIDQNVFIEGTLPMGVVRPLTEVEMDHYREPFLNPADREPLWRFPNELPIAGEPANVVALVEEYMDWLHQSPVPKLLFWGTPGVLIPPAEAARLAKSLPNCKAVDIGPGLNLLQEDNPDLIGSEIARWLSTLEISG

SEQ ID NO: 2940 - protein, 277 aa, Synthetic construct
MFHYVDVGPRDGTPVLFLHGNPTSSYVWRNIIPHVAPTHRCIAPDLIGMGKSDKPDLGYFFDDHVRFMDAFIEAMELEEVVLVIHDWGSALGFHWAKRNPERVKGIAFMEFIRPIPTWDEWPEFARETFQAFRTTDVGRKLIIDQNVFIEGTLPMGVVRPLTEVEMDHYREPFLNPVDREPLWRFPNELPIAGEPANIVALVEEYMDWLHQSPVPKLLFWGTPGVLIPPAEAARLAKSLPNCKAVDIGPGLNLLQEDNPDLIGSEIARWLSTLEISG

SEQ ID NO: 2941 - protein, 277 aa, Synthetic construct
MFHYVDVGPRDGTPVLFLHGNPTSSYVWRNIIPHVAPTHRCIAPDLIGMGKSDKPDLGYFFDDHVRFMDAFIEAMGLEEVVLVIHDWGAALGFHWAKRNPERVKGIAFMEFIRPIPTWDEWPEFARETFQAFRTTDVGRKLIIDQNVFIEGTLPMGVVRPLTEVEMDHYREPFLNPVDREPLWRFPNELPIAGEPANIVALVEEYMDWLHQSPVPKLLFWGTPGVLIPPAEAARLAKSLPNCKAVDIGPGLNLLQEDNPDLIGSEIARWLSTLEISG

SEQ ID NO: 2942 - protein, 277 aa, Synthetic construct
MFHYVDVGPRDGTPVLFLHGNPTSSYVWRNIIPHVAPTHRCIAPDLIGMGKSDKPDLGYFFDDHVRFMDAFIEAMGLEEVVLVIHDWGSALGFHWAKRYPERVKGIAFMEFIRPIPTWDEWPEFARETFQAFRTTDVGRKLIIDQNVFIEGTLPMGVVRPLTEVEMDHYREPFLNPVDREPLWRFPNELPIAGEPANIVALVEEYMDWLHQSPVPKLLFWGTPGVLIPPAEAARLAKSLPNCKAVDIGPGLNLLQEDNPDLIGSEIARWLSTLEISG

SEQ ID NO: 2943 - protein, 277 aa, Synthetic construct
MFHYVDVGPRDGTPVLFLHGNPTSSYVWRNIIPHVAPTHRCIAPDLIGMGKSDKPDLGYFFDDHVRFMDAFIEAMGLEEVVLVIHDWGSALGFHWAKRNPERVKGIAFFEFIRPIPTWDEWPEFARETFQAFRTTDVGRKLIIDQNVFIEGTLPMGVVRPLTEVEMDHYREPFLNPVDREPLWRFPNELPIAGEPANIVALVEEYMDWLHQSPVPKLLFWGTPGVLIPPAEAARLAKSLPNCKAVDIGPGLNLLQEDNPDLIGSEIARWLSTLEISG

SEQ ID NO: 2944 - protein, 277 aa, Synthetic construct
MFHYVDVGPRDGTPVLFLHGNPTSSYVWRNIIPHVAPTHRCIAPDLIGMGKSDKPDLGYFFDDHVRFMDAFIEAMGLEEVVLVIHDWGSALGFHWAKRNPERVKGIAFMEFIRPIPTWDEWPEFARETFQAFRTEDVGRKLIIDQNVFIEGTLPMGVVRPLTEVEMDHYREPFLNPVDREPLWRFPNELPIAGEPANIVALVEEYMDWLHQSPVPKLLFWGTPGVLIPPAEAARLAKSLPNCKAVDIGPGLNLLQEDNPDLIGSEIARWLSTLEISG

SEQ ID NO: 2945 - protein, 277 aa, Synthetic construct
MFHYVDVGPRDGTPVLFLHGNPTSSYVWRNIIPHVAPTHRCIAPDLIGMGKSDKPDLGYFFDDHVRFMDAFIEAMGLEEVVLVIHDWGSALGFHWAKRNPERVKGIAFMEFIRPIPTWDEWPEFARETFQAFRTTDVGRKLIIDQNVFIEGTLPMGVVRPLTEVEMDHYREPFLNPEDREPLWRFPNELPIAGEPANIVALVEEYMDWLHQSPVPKLLFWGTPGVLIPPAEAARLAKSLPNCKAVDIGPGLNLLQEDNPDLIGSEIARWLSTLEISG

SEQ ID NO: 2946 - protein, 277 aa, Synthetic construct
MFHYVDVGPRDGTPVLFLHGNPTSSYVWRNIIPHVAPTHRCIAPDLIGMGKSDKPDLGYFFDDHVRFMDAFIEAMGLEEVVLVIHDWGSALGFHWAKRNPERVKGIAFMEFIRPIPTWDEWPEFARETFQAFRTTDVGRKLIIDQNVFIEGTLPMGVVRPLTEVEMDHYREPFLNPVDREPLWRFPNELPIAGEPANIVKLVEEYMDWLHQSPVPKLLFWGTPGVLIPPAEAARLAKSLPNCKAVDIGPGLNLLQEDNPDLIGSEIARWLSTLEISG

SEQ ID NO: 2947 - protein, 277 aa, Synthetic construct; identical to SEQ ID NO: 2940

SEQ ID NO: 2948 - protein, 277 aa, Synthetic construct
MFHYVDVGPRDGTPVLFLHGNPTSSYVWRNIIPHVAPTHRCIAPDLIGMGKSDKPDLGYFFDDHVRFMDAFIEALELEEVVLVIHDWGAALGFHWAKRNPERVKGIAFMEFIRPIPTWDEWPEFARETFQAFRTTDVGRKLIIDQNVFIEGTLPMGVVRPLTEVEMDHYREPFLNPVDREPLWRFPNELPIAGEPANIVALVEEYMDWLHQSPVPKLLFWGTPGVLIPPAEAARLAKSLPNCKAVDIGPGLNLLQEDNPDLIGSEIARWLSTLEISG

SEQ ID NO: 2949 - protein, 277 aa, Synthetic construct
MFHYVDVGPRDGTPVLFLHGNPTSSYVWRNIIPHVAPTHRCIAPDLIGMGKSDKPDLGYFFDDHVRFMDAFIEALELEEVVLVIHDWGSALGFHWAKRYPERVKGIAFMEFIRPIPTWDEWPEFARETFQAFRTTDVGRKLIIDQNVFIEGTLPMGVVRPLTEVEMDHYREPFLNPVDREPLWRFPNELPIAGEPANIVALVEEYMDWLHQSPVPKLLFWGTPGVLIPPAEAARLAKSLPNCKAVDIGPGLNLLQEDNPDLIGSEIARWLSTLEISG

SEQ ID NO: 2950 - protein, 277 aa, Synthetic construct
MFHYVDVGPRDGTPVLFLHGNPTSSYVWRNIIPHVAPTHRCIAPDLIGMGKSDKPDLGYFFDDHVRFMDAFIEALELEEVVLVIHDWGSALGFHWAKRNPERVKGIAFFEFIRPIPTWDEWPEFARETFQAFRTTDVGRKLIIDQNVFIEGTLPMGVVRPLTEVEMDHYREPFLNPVDREPLWRFPNELPIAGEPANIVALVEEYMDWLHQSPVPKLLFWGTPGVLIPPAEAARLAKSLPNCKAVDIGPGLNLLQEDNPDLIGSEIARWLSTLEISG

SEQ ID NO: 2951 - protein, 277 aa, Synthetic construct
MFHYVDVGPRDGTPVLFLHGNPTSSYVWRNIIPHVAPTHRCIAPDLIGMGKSDKPDLGYFFDDHVRFMDAFIEALELEEVVLVIHDWGSALGFHWAKRNPERVKGIAFMEFIRPIPTWDEWPEFARETFQAFRTEDVGRKLIIDQNVFIEGTLPMGVVRPLTEVEMDHYREPFLNPVDREPLWRFPNELPIAGEPANIVALVEEYMDWLHQSPVPKLLFWGTPGVLIPPAEAARLAKSLPNCKAVDIGPGLNLLQEDNPDLIGSEIARWLSTLEISG

SEQ ID NO: 2952 - protein, 277 aa, Synthetic construct
MFHYVDVGPRDGTPVLFLHGNPTSSYVWRNIIPHVAPTHRCIAPDLIGMGKSDKPDLGYFFDDHVRFMDAFIEALELEEVVLVIHDWGSALGFHWAKRNPERVKGIAFMEFIRPIPTWDEWPEFARETFQAFRTTDVGRKLIIDQNVFIEGTLPMGVVRPLTEVEMDHYREPFLNPEDREPLWRFPNELPIAGEPANIVALVEEYMDWLHQSPVPKLLFWGTPGVLIPPAEAARLAKSLPNCKAVDIGPGLNLLQEDNPDLIGSEIARWLSTLEISG

SEQ ID NO: 2953 - protein, 277 aa, Synthetic construct
MFHYVDVGPRDGTPVLFLHGNPTSSYVWRNIIPHVAPTHRCIAPDLIGMGKSDKPDLGYFFDDHVRFMDAFIEALELEEVVLVIHDWGSALGFHWAKRNPERVKGIAFMEFIRPIPTWDEWPEFARETFQAFRTTDVGRKLIIDQNVFIEGTLPMGVVRPLTEVEMDHYREPFLNPVDREPLWRFPNELPIAGEPANIVKLVEEYMDWLHQSPVPKLLFWGTPGVLIPPAEAARLAKSLPNCKAVDIGPGLNLLQEDNPDLIGSEIARWLSTLEISG

SEQ ID NO: 2954 - protein, 277 aa, Synthetic construct; identical to SEQ ID NO: 2941

SEQ ID NO: 2955 - protein, 277 aa, Synthetic construct; identical to SEQ ID NO: 2948

SEQ ID NO: 2956 - protein, 277 aa, Synthetic construct
MFHYVDVGPRDGTPVLFLHGNPTSSYVWRNIIPHVAPTHRCIAPDLIGMGKSDKPDLGYFFDDHVRFMDAFIEALGLEEVVLVIHDWGAALGFHWAKRYPERVKGIAFMEFIRPIPTWDEWPEFARETFQAFRTTDVGRKLIIDQNVFIEGTLPMGVVRPLTEVEMDHYREPFLNPVDREPLWRFPNELPIAGEPANIVALVEEYMDWLHQSPVPKLLFWGTPGVLIPPAEAARLAKSLPNCKAVDIGPGLNLLQEDNPDLIGSEIARWLSTLEISG

SEQ ID NO: 2957 - protein, 277 aa, Synthetic construct
MFHYVDVGPRDGTPVLFLHGNPTSSYVWRNIIPHVAPTHRCIAPDLIGMGKSDKPDLGYFFDDHVRFMDAFIEALGLEEVVLVIHDWGAALGFHWAKRNPERVKGIAFFEFIRPIPTWDEWPEFARETFQAFRTTDVGRKLIIDQNVFIEGTLPMGVVRPLTEVEMDHYREPFLNPVDREPLWRFPNELPIAGEPANIVALVEEYMDWLHQSPVPKLLFWGTPGVLIPPAEAARLAKSLPNCKAVDIGPGLNLLQEDNPDLIGSEIARWLSTLEISG

SEQ ID NO: 2958 - protein, 277 aa, Synthetic construct
MFHYVDVGPRDGTPVLFLHGNPTSSYVWRNIIPHVAPTHRCIAPDLIGMGKSDKPDLGYFFDDHVRFMDAFIEALGLEEVVLVIHDWGAALGFHWAKRNPERVKGIAFMEFIRPIPTWDEWPEFARETFQAFRTEDVGRKLIIDQNVFIEGTLPMGVVRPLTEVEMDHYREPFLNPVDREPLWRFPNELPIAGEPANIVALVEEYMDWLHQSPVPKLLFWGTPGVLIPPAEAARLAKSLPNCKAVDIGPGLNLLQEDNPDLIGSEIARWLSTLEISG

SEQ ID NO: 2959 - protein, 277 aa, Synthetic construct
MFHYVDVGPRDGTPVLFLHGNPTSSYVWRNIIPHVAPTHRCIAPDLIGMGKSDKPDLGYFFDDHVRFMDAFIEALGLEEVVLVIHDWGAALGFHWAKRNPERVKGIAFMEFIRPIPTWDEWPEFARETFQAFRTTDVGRKLIIDQNVFIEGTLPMGVVRPLTEVEMDHYREPFLNPEDREPLWRFPNELPIAGEPANIVALVEEYMDWLHQSPVPKLLFWGTPGVLIPPAEAARLAKSLPNCKAVDIGPGLNLLQEDNPDLIGSEIARWLSTLEISG

SEQ ID NO: 2960 - protein, 277 aa, Synthetic construct
MFHYVDVGPRDGTPVLFLHGNPTSSYVWRNIIPHVAPTHRCIAPDLIGMGKSDKPDLGYFFDDHVRFMDAFIEALGLEEVVLVIHDWGAALGFHWAKRNPERVKGIAFMEFIRPIPTWDEWPEFARETFQAFRTTDVGRKLIIDQNVFIEGTLPMGVVRPLTEVEMDHYREPFLNPVDREPLWRFPNELPIAGEPANIVKLVEEYMDWLHQSPVPKLLFWGTPGVLIPPAEAARLAKSLPNCKAVDIGPGLNLLQEDNPDLIGSEIARWLSTLEISG

SEQ ID NO: 2961 - protein, 277 aa, Synthetic construct; identical to SEQ ID NO: 2942

SEQ ID NO: 2962 - protein, 277 aa, Synthetic construct; identical to SEQ ID NO: 2949

SEQ ID NO: 2963 - protein, 277 aa, Synthetic construct; identical to SEQ ID NO: 2956

SEQ ID NO: 2964 - protein, 277 aa, Synthetic construct
MFHYVDVGPRDGTPVLFLHGNPTSSYVWRNIIPHVAPTHRCIAPDLIGMGKSDKPDLGYFFDDHVRFMDAFIEALGLEEVVLVIHDWGSALGFHWAKRYPERVKGIAFFEFIRPIPTWDEWPEFARETFQAFRTTDVGRKLIIDQNVFIEGTLPMGVVRPLTEVEMDHYREPFLNPVDREPLWRFPNELPIAGEPANIVALVEEYMDWLHQSPVPKLLFWGTPGVLIPPAEAARLAKSLPNCKAVDIGPGLNLLQEDNPDLIGSEIARWLSTLEISG

SEQ ID NO: 2965 - protein, 277 aa, Synthetic construct
MFHYVDVGPRDGTPVLFLHGNPTSSYVWRNIIPHVAPTHRCIAPDLIGMGKSDKPDLGYFFDDHVRFMDAFIEALGLEEVVLVIHDWGSALGFHWAKRYPERVKGIAFMEFIRPIPTWDEWPEFARETFQAFRTEDVGRKLIIDQNVFIEGTLPMGVVRPLTEVEMDHYREPFLNPVDREPLWRFPNELPIAGEPANIVALVEEYMDWLHQSPVPKLLFWGTPGVLIPPAEAARLAKSLPNCKAVDIGPGLNLLQEDNPDLIGSEIARWLSTLEISG

SEQ ID NO: 2966 - protein, 277 aa, Synthetic construct
MFHYVDVGPRDGTPVLFLHGNPTSSYVWRNIIPHVAPTHRCIAPDLIGMGKSDKPDLGYFFDDHVRFMDAFIEALGLEEVVLVIHDWGSALGFHWAKRYPERVKGIAFMEFIRPIPTWDEWPEFARETFQAFRTTDVGRKLIIDQNVFIEGTLPMGVVRPLTEVEMDHYREPFLNPEDREPLWRFPNELPIAGEPANIVALVEEYMDWLHQSPVPKLLFWGTPGVLIPPAEAARLAKSLPNCKAVDIGPGLNLLQEDNPDLIGSEIARWLSTLEISG

SEQ ID NO: 2967 - protein, 277 aa, Synthetic construct
MFHYVDVGPRDGTPVLFLHGNPTSSYVWRNIIPHVAPTHRCIAPDLIGMGKSDKPDLGYFFDDHVRFMDAFIEALGLEEVVLVIHDWGSALGFHWAKRYPERVKGIAFMEFIRPIPTWDEWPEFARETFQAFRTTDVGRKLIIDQNVFIEGTLPMGVVRPLTEVEMDHYREPFLNPVDREPLWRFPNELPIAGEPANIVKLVEEYMDWLHQSPVPKLLFWGTPGVLIPPAEAARLAKSLPNCKAVDIGPGLNLLQEDNPDLIGSEIARWLSTLEISG

SEQ ID NO: 2968 - protein, 277 aa, Synthetic construct; identical to SEQ ID NO: 2943

SEQ ID NO: 2969 - protein, 277 aa, Synthetic construct; identical to SEQ ID NO: 2950

SEQ ID NO: 2970 - protein, 277 aa, Synthetic construct; identical to SEQ ID NO: 2957

SEQ ID NO: 2971 - protein, 277 aa, Synthetic construct; identical to SEQ ID NO: 2964

SEQ ID NO: 2972 - protein, 277 aa, Synthetic construct
MFHYVDVGPRDGTPVLFLHGNPTSSYVWRNIIPHVAPTHRCIAPDLIGMGKSDKPDLGYFFDDHVRFMDAFIEALGLEEVVLVIHDWGSALGFHWAKRNPERVKGIAFFEFIRPIPTWDEWPEFARETFQAFRTEDVGRKLIIDQNVFIEGTLPMGVVRPLTEVEMDHYREPFLNPVDREPLWRFPNELPIAGEPANIVALVEEYMDWLHQSPVPKLLFWGTPGVLIPPAEAARLAKSLPNCKAVDIGPGLNLLQEDNPDLIGSEIARWLSTLEISG

SEQ ID NO: 2973 - protein, 277 aa, Synthetic construct
MFHYVDVGPRDGTPVLFLHGNPTSSYVWRNIIPHVAPTHRCIAPDLIGMGKSDKPDLGYFFDDHVRFMDAFIEALGLEEVVLVIHDWGSALGFHWAKRNPERVKGIAFFEFIRPIPTWDEWPEFARETFQAFRTTDVGRKLIIDQNVFIEGTLPMGVVRPLTEVEMDHYREPFLNPEDREPLWRFPNELPIAGEPANIVALVEEYMDWLHQSPVPKLLFWGTPGVLIPPAEAARLAKSLPNCKAVDIGPGLNLLQEDNPDLIGSEIARWLSTLEISG

SEQ ID NO: 2974 - protein, 277 aa, Synthetic construct
MFHYVDVGPRDGTPVLFLHGNPTSSYVWRNIIPHVAPTHRCIAPDLIGMGKSDKPDLGYFFDDHVRFMDAFIEALGLEEVVLVIHDWGSALGFHWAKRNPERVKGIAFFEFIRPIPTWDEWPEFARETFQAFRTTDVGRKLIIDQNVFIEGTLPMGVVRPLTEVEMDHYREPFLNPVDREPLWRFPNELPIAGEPANIVKLVEEYMDWLHQSPVPKLLFWGTPGVLIPPAEAARLAKSLPNCKAVDIGPGLNLLQEDNPDLIGSEIARWLSTLEISG

SEQ ID NO: 2975 - protein, 277 aa, Synthetic construct; identical to SEQ ID NO: 2944

SEQ ID NO: 2976 - protein, 277 aa, Synthetic construct; identical to SEQ ID NO: 2951

SEQ ID NO: 2977 - protein, 277 aa, Synthetic construct; identical to SEQ ID NO: 2958

SEQ ID NO: 2978 - protein, 277 aa, Synthetic construct; identical to SEQ ID NO: 2965

SEQ ID NO: 2979 - protein, 277 aa, Synthetic construct; identical to SEQ ID NO: 2972

SEQ ID NO: 2980 - protein, 277 aa, Synthetic construct
MFHYVDVGPRDGTPVLFLHGNPTSSYVWRNIIPHVAPTHRCIAPDLIGMGKSDKPDLGYFFDDHVRFMDAFIEALGLEEVVLVIHDWGSALGFHWAKRNPERVKGIAFMEFIRPIPTWDEWPEFARETFQAFRTEDVGRKLIIDQNVFIEGTLPMGVVRPLTEVEMDHYREPFLNPEDREPLWRFPNELPIAGEPANIVALVEEYMDWLHQSPVPKLLFWGTPGVLIPPAEAARLAKSLPNCKAVDIGPGLNLLQEDNPDLIGSEIARWLSTLEISG

SEQ ID NO: 2981 - protein, 277 aa, Synthetic construct
MFHYVDVGPRDGTPVLFLHGNPTSSYVWRNIIPHVAPTHRCIAPDLIGMGKSDKPDLGYFFDDHVRFMDAFIEALGLEEVVLVIHDWGSALGFHWAKRNPERVKGIAFMEFIRPIPTWDEWPEFARETFQAFRTEDVGRKLIIDQNVFIEGTLPMGVVRPLTEVEMDHYREPFLNPVDREPLWRFPNELPIAGEPANIVKLVEEYMDWLHQSPVPKLLFWGTPGVLIPPAEAARLAKSLPNCKAVDIGPGLNLLQEDNPDLIGSEIARWLSTLEISG

SEQ ID NO: 2982 - protein, 277 aa, Synthetic construct; identical to SEQ ID NO: 2945

SEQ ID NO: 2983 - protein, 277 aa, Synthetic construct; identical to SEQ ID NO: 2952

SEQ ID NO: 2984 - protein, 277 aa, Synthetic construct; identical to SEQ ID NO: 2959

SEQ ID NO: 2985 - protein, 277 aa, Synthetic construct; identical to SEQ ID NO: 2966

SEQ ID NO: 2986 - protein, 277 aa, Synthetic construct; identical to SEQ ID NO: 2973

SEQ ID NO: 2987 - protein, 277 aa, Synthetic construct; identical to SEQ ID NO: 2980

SEQ ID NO: 2988 - protein, 277 aa, Synthetic construct
MFHYVDVGPRDGTPVLFLHGNPTSSYVWRNIIPHVAPTHRCIAPDLIGMGKSDKPDLGYFFDDHVRFMDAFIEALGLEEVVLVIHDWGSALGFHWAKRNPERVKGIAFMEFIRPIPTWDEWPEFARETFQAFRTTDVGRKLIIDQNVFIEGTLPMGVVRPLTEVEMDHYREPFLNPEDREPLWRFPNELPIAGEPANIVKLVEEYMDWLHQSPVPKLLFWGTPGVLIPPAEAARLAKSLPNCKAVDIGPGLNLLQEDNPDLIGSEIARWLSTLEISG

SEQ ID NO: 2989 - protein, 277 aa, Synthetic construct; identical to SEQ ID NO: 2946

SEQ ID NO: 2990 - protein, 277 aa, Synthetic construct; identical to SEQ ID NO: 2953

SEQ ID NO: 2991 - protein, 277 aa, Synthetic construct; identical to SEQ ID NO: 2960

SEQ ID NO: 2992 - protein, 277 aa, Synthetic construct; identical to SEQ ID NO: 2967

SEQ ID NO: 2993 - protein, 277 aa, Synthetic construct; identical to SEQ ID NO: 2974

SEQ ID NO: 2994 - protein, 277 aa, Synthetic construct; identical to SEQ ID NO: 2981

SEQ ID NO: 2995 - protein, 277 aa, Synthetic construct; identical to SEQ ID NO: 2988

SEQ ID NO: 2996 - protein, 277 aa, Synthetic construct
MFHYVDVGPRDGTPVLFLHGNPTSSYVWRNIIPHVSPTHRCIAPDLIGMGKSGKPDLGYFFDDHVRFMDAFIEALGLEEVVLVIHDWGSALGFHWAKRNPERVKGIAFMEFIRPIPTWDEWPEFARETFQAFRTTDVGRKLIIDQNVFIEGTLPMGVVRPLTEVEMDHYREPFLNPADREPLWRFPNELPIAGEPANIVALVEEYMDWLHQSPVPKLLFWGTPGVLIPPAEAARLAKSLPNCKAVDIGPGLNLLQEDNPDLIGSEIARWLSTLEISG

SEQ ID NO: 2997 - protein, 277 aa, Synthetic construct
MFHYVDEGPRDGTPVLFLHGNPTSSYVWRNIIPHVSPTHRCIAPDLIGMGKSDKPDLGYFFDDHVRFMDAFIEALGLEEVVLVIHDWGSALGFHWAKRNPERVKGIAFMEFIRPIPTWDEWPEFARETFQAFRTTDVGRKLIIDQNVFIEGTLPMGVVRPLTEVEMDHYREPFLNPADREPLWRFPNELPIAGEPANIVALVEEYMDWLHQSPVPKLLFWGTPGVLIPPAEAARLAKSLPNCKAVDIGPGLNLLQEDNPDLIGSEIARWLSTLEISG

SEQ ID NO: 2998 - protein, 277 aa, Synthetic construct
MFHYVDEGPRDGTPVLFLHGNPTSSYVWRNIIPHVSPTHRCIAPDLIGMGKSGKPDLGYFFDDHVRFMDAFIEALGLEEVVLVIHDWGSALGFHWAKRNPERVKGIAFMEFIRPIPTWDEWPEFARETFQAFRTTDVGRKLIIDQNVFIEGTLPMGVVRPLTEVEMDHYREPFLNPADREPLWRFPNELPIAGEPANIVALVEEYMDWLHQSPVPKLLFWGTPGVLIPPAEAARLAKSLPNCKAVDIGPGLNLLQEDNPDLIGSEIARWLSTLEISG

SEQ ID NO: 2999 - protein, 277 aa, Synthetic construct
MFHYVDEGPRDGTPVLFLHGNPTSSYVWRNIIPHVSPTHRCIAPDLIGMGKSDKPDLGYFFDDHVRFMDAFIEALGLEEVVLVIHDWGSALGFHWAKRNPERVKGIAFMEFIRPIPTWDEWPEFARETFQAFRTTDVGRKLIIDQNVFIEGTLPMGVVRPLTEVEMDHYREPFLNPADREPLWRFPNELPIAGEPANIVALVEEYMDWLHQSPVPKLLFWGTPGVLIPPAEAARLAKSLPNCKAVDIGPGLNLLQEDNPDLIGAEIARWLSTLEISG

SEQ ID NO: 3000 - protein, 277 aa, Synthetic construct
MFHYVDEGPRDGTPVLFLHGNPTSSYVWRNIIPHVSPTHRCIAPDLIGMGKSDKPDLGYFFDDHVRFMDAFIEALGLEEVVLVIHDWGSALGFHWAKRNPERVKGIAFMEFIRPIPTWDEWPEFARETFQAFRTTDVGRKLIIDQNVFIEGTLPMGVVRPLTEVEMDHYREPFLNPADREPLWRFPNELPIAGEPANIVALVEEYMDWLHQSPVPKLLFWGTPGVLIPPAEAARLAKTLPNCKAVDIGPGLNLLQEDNPDLIGSEIARWLSTLEISG

SEQ ID NO: 3001 - protein, 277 aa, Synthetic construct
MFHYVDVGPRDGTPVLFLHGNPTSSYVWRNIIPHVSPTHRCIAPDLIGMGKSGKPDLGYFFDDHVRFMDAFIEALGLEEVVLVIHDWGSALGFHWAKRNPERVKGIAFMEFIRPIPTWDEFPEFARETFQAFRTTDVGRKLIIDQNVFIEGTLPMGVVRPLTEVEMDHYREPFLNPADREPLWRFPNELPIAGEPANVVALVEEYMDWLHQSPVPKLLFWGTPGVLIPPAEAARLAKSLPNCKAVDIGPGLNLLQEDNPDLIGSEIARWLSTLEISG

SEQ ID NO: 3002 - protein, 277 aa, Synthetic construct
MFHYVDVGPRDGTPVLFLHGNPTSSYVWRNIIPHVSPTHRCIAPDLIGMGKSGKPDLGYFFDDHVRFMDAFIEALGLEEVVLVIHDWGSALGFHWAKRNPERVKGIAFMEFIRPIPTWDEWPEFARETFQAFRTTDVGRKLIIDQNVFIEGTLPMGVVRPLTEVEMDHYREPFLNPADREPLWRFPNELPIAGEPANVVALVEEYMDWLHQSPVPKLLFWGTPGVLIPPAEAARLAKSLPNCKAVDIGPGLNLLQEDNPDLIGSEIARWLSTLEISG

SEQ ID NO: 3003 - protein, 277 aa, Synthetic construct
MFHYVDEGPRDGTPVLFLHGNPTSSYVWRNIIPHVSPTHRCIAPDLIGMGKSGKPDLGYFFDDHVRFMDAFIEALGLEEVVLVIHDWGSALGFHWAKRNPERVKGIAFMEFIRPIPTWDEWPEFARETFQAFRTTDVGRKLIIDQNVFIEGTLPMGVVRPLTEVEMDHYREPFLNPADREPLWRFPNELPIAGEPANIVALVEEYMDWLHQSPVPKLLFWGTPGVLIPPAEAARLAKSLPNCKAVDIGPGLNLLQEDNPDLIGAEIARWLSTLEISG

SEQ ID NO: 3004 - protein, 277 aa, Synthetic construct
MFHYVDVGPRDGTPVLFLHGNPTSSYVWRNIIPHVAPTHRCIAPDLIGMGKSGKPDLGYFFDDHVRFMDAFIEAMGLEEVVLVIHDWGSALGFHWAKRNPERVKGIAFMEFIRPIPTWDEWPEFARETFQAFRTTDVGRKLIIDQNVFIEGTLPMGVVRPLTEVEMDHYREPFLNPADREPLWRFPNELPIAGEPANIVALVEEYMDWLHQSPVPKLLFWGTPGVLIPPAEAARLAKSLPNCKAVDIGPGLNLLQEDNPDLIGSEIARWLSTLEISG

SEQ ID NO: 3005 - protein, 277 aa, Synthetic construct
MFHYVDVGPRDGTPVLFLHGNPTSSYVWRNIIPHVAPTHRCIAPDLIGMGKSGKPDLGYFFDDHVRFMDAFIEALGLEEVVLVIHDWGAALGFHWAKRNPERVKGIAFMEFIRPIPTWDEWPEFARETFQAFRTTDVGRKLIIDQNVFIEGTLPMGVVRPLTEVEMDHYREPFLNPADREPLWRFPNELPIAGEPANIVALVEEYMDWLHQSPVPKLLFWGTPGVLIPPAEAARLAKSLPNCKAVDIGPGLNLLQEDNPDLIGSEIARWLSTLEISG

SEQ ID NO: 3006 - protein, 277 aa, Synthetic construct
MFHYVDVGPRDGTPVLFLHGNPTSSYVWRNIIPHVAPTHRCIAPDLIGMGKSGKPDLGYFFDDHVRFMDAFIEALGLEEVVLVIHDWGSALGFHWAKRYPERVKGIAFMEFIRPIPTWDEWPEFARETFQAFRTTDVGRKLIIDQNVFIEGTLPMGVVRPLTEVEMDHYREPFLNPADREPLWRFPNELPIAGEPANIVALVEEYMDWLHQSPVPKLLFWGTPGVLIPPAEAARLAKSLPNCKAVDIGPGLNLLQEDNPDLIGSEIARWLSTLEISG

SEQ ID NO: 3007 - protein, 277 aa, Synthetic construct
MFHYVDVGPRDGTPVLFLHGNPTSSYVWRNIIPHVSPTHRCIAPDLIGMGKSGKPDLGYFFDDHVRFMDAFIEAMGLEEVVLVIHDWGSALGFHWAKRNPERVKGIAFMEFIRPIPTWDEWPEFARETFQAFRTTDVGRKLIIDQNVFIEGTLPMGVVRPLTEVEMDHYREPFLNPADREPLWRFPNELPIAGEPANIVALVEEYMDWLHQSPVPKLLFWGTPGVLIPPAEAARLAKSLPNCKAVDIGPGLNLLQEDNPDLIGSEIARWLSTLEISG

SEQ ID NO: 3008 - protein, 277 aa, Synthetic construct
MFHYVDVGPRDGTPVLFLHGNPTSSYVWRNIIPHVSPTHRCIAPDLIGMGKSGKPDLGYFFDDHVRFMDAFIEALGLEEVVLVIHDWGAALGFHWAKRNPERVKGIAFMEFIRPIPTWDEWPEFARETFQAFRTTDVGRKLIIDQNVFIEGTLPMGVVRPLTEVEMDHYREPFLNPADREPLWRFPNELPIAGEPANIVALVEEYMDWLHQSPVPKLLFWGTPGVLIPPAEAARLAKSLPNCKAVDIGPGLNLLQEDNPDLIGSEIARWLSTLEISG

SEQ ID NO: 3009 - protein, 277 aa, Synthetic construct
MFHYVDVGPRDGTPVLFLHGNPTSSYVWRNIIPHVSPTHRCIAPDLIGMGKSGKPDLGYFFDDHVRFMDAFIEALGLEEVVLVIHDWGSALGFHWAKRYPERVKGIAFMEFIRPIPTWDEWPEFARETFQAFRTTDVGRKLIIDQNVFIEGTLPMGVVRPLTEVEMDHYREPFLNPADREPLWRFPNELPIAGEPANIVALVEEYMDWLHQSPVPKLLFWGTPGVLIPPAEAARLAKSLPNCKAVDIGPGLNLLQEDNPDLIGSEIARWLSTLEISG

SEQ ID NO: 3010 - protein, 277 aa, Synthetic construct
MMHYVDEGPRDGTPVLFLHGNPTSSYVWRNIIPHVAPTHRCIAPDLIGMGKSDKPDLGYFFDDHVRFMDAFIEALGLEEVVLVIHDWGSALGFHWAKRNPERVKGIAFMEFIRPIPTWDEWPEFARETFQAFRTTDVGRKLIIDHNVFIEGTLRMGVVRPLTEVEMDHYREPFLNPVDREPLWRFPNELPIAGEPANIVALVEEYMDWLHQSPVPKLLFWGTPGVLIPPAEAARLAKTLPNCKAVDIGPGLNLLQEDNPDLIGAEIARWLSTLEISG

SEQ ID NO: 3011 - protein, 277 aa, Synthetic construct
MMHYVDEGPRDGTPVLFLHGNPTSSYVWRNIIPHVAPTHRCIAPDLIGMGKSGKPDLGYFFDDHVRFMDAFIEALGLEEVVLVIHDWGSALGFHWAKRNPERVKGIAFMEFIRPIPTWDEWPEFARETFQAFRTTDVGRKLIIDHNVFIEGTLRMGVVRPLTEVEMDHYREPFLNPVDREPLWRFPNELPIAGEPANIVALVEEYMDWLHQSPVPKLLFWGTPGVLIPPAEAARLAKTLPNCKAVDIGPGLNLLQEDNPDLIGSEIARWLSTLEISG

SEQ ID NO: 3012 - protein, 277 aa, Synthetic construct
MMHYVDEGPRDGTPVLFLHGNPTSSYVWRNIIPHVAPTHRCIAPDLIGMGKSDKPDLGYFFDDHVRFMDAFIEALGLEEVVLVIHDWGSALGFHWAKRNPERVKGIAFMEFIRPIPTWDEWPEFARETFQAFRTTDVGRKLIIDHNVFIEGTLRMGVVRPLTEVEMDHYREPFLNPADREPLWRFPNELPIAGEPANIVALVEEYMDWLHQSPVPKLLFWGTPGVLIPPAEAARLAKTLPNCKAVDIGPGLNLLQEDNPDLIGSEIARWLSTLEISG

SEQ ID NO: 3013 - protein, 277 aa, Synthetic construct
MMHYVDEGPRDGTPVLFLHGNPTSSYVWRNIIPHVAPTHRCIAPDLIGMGKSDKPDLGYFFDDHVRFMDAFIEALGLEEVVLVIHDWGSALGFHWAKRNPERVKGIAFMEFIRPIPTWDEFPEFARETFQAFRTTDVGRKLIIDHNVFIEGTLRMGVVRPLTEVEMDHYREPFLNPVDREPLWRFPNELPIAGEPANIVALVEEYMDWLHQSPVPKLLFWGTPGVLIPPAEAARLAKTLPNCKAVDIGPGLNLLQEDNPDLIGSEIARWLSTLEISG

SEQ ID NO: 3014 - protein, 277 aa, Synthetic construct
MMHYVDEGPRDGTPVLFLHGNPTSSYVWRNIIPHVAPTHRCIAPDLIGMGKSDKPDLGYFFDDHVRFMDAFIEALGLEEVVLVIHDWGSALGFHWAKRNPERVKGIAFMEFIRPIPTWDEWPEFARETFQAFRTTDVGRKLIIDHNVFIEGTLRMGVVRPLTEVEMDHYREPFLNPVDREPLWRFPNELPIAGEPANVVALVEEYMDWLHQSPVPKLLFWGTPGVLIPPAEAARLAKTLPNCKAVDIGPGLNLLQEDNPDLIGSEIARWLSTLEISG

SEQ ID NO: 3015 - protein, 277 aa, Synthetic construct
MMHYVDEGPRDGTPVLFLHGNPTSSYVWRNIIPHVAPTHRCIAPDLIGMGKSGKPDLGYFFDDHVRFMDAFIEALGLEEVVLVIHDWGSALGFHWAKRNPERVKGIAFMEFIRPIPTWDEWPEFARETFQAFRTTDVGRKLIIDHNVFIEGTLRMGVVRPLTEVEMDHYREPFLNPADREPLWRFPNELPIAGEPANIVALVEEYMDWLHQSPVPKLLFWGTPGVLIPPAEAARLAKTLPNCKAVDIGPGLNLLQEDNPDLIGSEIARWLSTLEISG

SEQ ID NO: 3016 - protein, 277 aa, Synthetic construct
MMHYVDEGPRDGTPVLFLHGNPTSSYVWRNIIPHVAPTHRCIAPDLIGMGKSDKPDLGYFFDDHVRFMDAFIEALGLEEVVLVIHDWGSALGFHWAKRNPERVKGIAFMEFIRPIPTWDEFPEFARETFQAFRTTDVGRKLIIDHNVFIEGTLRMGVVRPLTEVEMDHYREPFLNPVDREPLWRFPNELPIAGEPANVVALVEEYMDWLHQSPVPKLLFWGTPGVLIPPAEAARLAKTLPNCKAVDIGPGLNLLQEDNPDLIGSEIARWLSTLEISG

SEQ ID NO: 3017 - protein, 277 aa, Synthetic construct
MMHYVDEGPRDGTPVLFLHGNPTSSYVWRNIIPHVAPTHRCIAPDLIGMGKSGKPDLGYFFDDHVRFMDAFIEALGLEEVVLVIHDWGSALGFHWAKRNPERVKGIAFMEFIRPIPTWDEWPEFARETFQAFRTTDVGRKLIIDHNVFIEGTLRMGVVRPLTEVEMDHYREPFLNPVDREPLWRFPNELPIAGEPANIVALVEEYMDWLHQSPVPKLLFWGTPGVLIPPAEAARLAKSLPNCKAVDIGPGLNLLQEDNPDLIGAEIARWLSTLEISG

SEQ ID NO: 3018 - protein, 277 aa, Synthetic construct
MMHYVDEGPRDGTPVLFLHGNPTSSYVWRNIIPHVAPTHRCIAPDLIGMGKSDKPDLGYFFDDHVRFMDAFIEALGLEEVVLVIHDWGSALGFHWAKRNPERVKGIAFMEFIRPIPTWDEWPEFARETFQAFRTTDVGRKLIIDHNVFIEGTLRMGVVRPLTEVEMDHYREPFLNPADREPLWRFPNELPIAGEPANIVALVEEYMDWLHQSPVPKLLFWGTPGVLIPPAEAARLAKSLPNCKAVDIGPGLNLLQEDNPDLIGAEIARWLSTLEISG

SEQ ID NO: 3019 - protein, 277 aa, Synthetic construct
MMHYVDEGPRDGTPVLFLHGNPTSSYVWRNIIPHVAPTHRCIAPDLIGMGKSDKPDLGYFFDDHVRFMDAFIEALGLEEVVLVIHDWGSALGFHWAKRNPERVKGIAFMEFIRPIPTWDEFPEFARETFQAFRTTDVGRKLIIDHNVFIEGTLRMGVVRPLTEVEMDHYREPFLNPVDREPLWRFPNELPIAGEPANIVALVEEYMDWLHQSPVPKLLFWGTPGVLIPPAEAARLAKSLPNCKAVDIGPGLNLLQEDNPDLIGAEIARWLSTLEISG

SEQ ID NO: 3020 - protein, 277 aa, Synthetic construct
MMHYVDEGPRDGTPVLFLHGNPTSSYVWRNIIPHVAPTHRCIAPDLIGMGKSDKPDLGYFFDDHVRFMDAFIEALGLEEVVLVIHDWGSALGFHWAKRNPERVKGIAFMEFIRPIPTWDEWPEFARETFQAFRTTDVGRKLIIDHNVFIEGTLRMGVVRPLTEVEMDHYREPFLNPVDREPLWRFPNELPIAGEPANVVALVEEYMDWLHQSPVPKLLFWGTPGVLIPPAEAARLAKSLPNCKAVDIGPGLNLLQEDNPDLIGAEIARWLSTLEISG

SEQ ID NO: 3021 - protein, 277 aa, Synthetic construct
MMHYVDEGPRDGTPVLFLHGNPTSSYVWRNIIPHVAPTHRCIAPDLIGMGKSGKPDLGYFFDDHVRFMDAFIEALGLEEVVLVIHDWGSALGFHWAKRNPERVKGIAFMEFIRPIPTWDEWPEFARETFQAFRTTDVGRKLIIDHNVFIEGTLRMGVVRPLTEVEMDHYREPFLNPADREPLWRFPNELPIAGEPANIVALVEEYMDWLHQSPVPKLLFWGTPGVLIPPAEAARLAKSLPNCKAVDIGPGLNLLQEDNPDLIGAEIARWLSTLEISG

SEQ ID NO: 3022 - protein, 277 aa, Synthetic construct
MMHYVDEGPRDGTPVLFLHGNPTSSYVWRNIIPHVAPTHRCIAPDLIGMGKSDKPDLGYFFDDHVRFMDAFIEALGLEEVVLVIHDWGSALGFHWAKRNPERVKGIAFMEFIRPIPTWDEFPEFARETFQAFRTTDVGRKLIIDHNVFIEGTLRMGVVRPLTEVEMDHYREPFLNPVDREPLWRFPNELPIAGEPANVVALVEEYMDWLHQSPVPKLLFWGTPGVLIPPAEAARLAKSLPNCKAVDIGPGLNLLQEDNPDLIGAEIARWLSTLEISG

SEQ ID NO: 3023 - protein, 277 aa, Synthetic construct
MMHYVDEGPRDGTPVLFLHGNPTSSYVWRNIIPHVAPTHRCIAPDLIGMGKSGKPDLGYFFDDHVRFMDAFIEALGLEEVVLVIHDWGSALGFHWAKRNPERVKGIAFMEFIRPIPTWDEWPEFARETFQAFRTTDVGRKLIIDHNVFIEGTLRMGVVRPLTEVEMDHYREPFLNPADREPLWRFPNELPIAGEPANIVALVEEYMDWLHQSPVPKLLFWGTPGVLIPPAEAARLAKSLPNCKAVDIGPGLNLLQEDNPDLIGSEIARWLSTLEISG

SEQ ID NO: 3024 - protein, 277 aa, Synthetic construct
MMHYVDVGPRDGTPVLFLHGNPTSSYVWRNIIPHVAPTHRCIAPDLIGMGKSGKPDLGYFFDDHVRFMDAFIEALGLEEVVLVIHDWGSALGFHWAKRNPERVKGIAFMEFIRPIPTWDEWPEFARETFQAFRTTDVGRKLIIDHNVFIEGTLRMGVVRPLTEVEMDHYREPFLNPADREPLWRFPNELPIAGEPANIVALVEEYMDWLHQSPVPKLLFWGTPGVLIPPAEAARLAKTLPNCKAVDIGPGLNLLQEDNPDLIGSEIARWLSTLEISG

SEQ ID NO: 3025 - protein, 277 aa, Synthetic construct
MMHYVDVGPRDGTPVLFLHGNPTSSYVWRNIIPHVAPTHRCIAPDLIGMGKSGKPDLGYFFDDHVRFMDAFIEALGLEEVVLVIHDWGSALGFHWAKRNPERVKGIAFMEFIRPIPTWDEWPEFARETFQAFRTTDVGRKLIIDHNVFIEGTLRMGVVRPLTEVEMDHYREPFLNPADREPLWRFPNELPIAGEPANIVALVEEYMDWLHQSPVPKLLFWGTPGVLIPPAEAARLAKSLPNCKAVDIGPGLNLLQEDNPDLIGAEIARWLSTLEISG

SEQ ID NO: 3026 - protein, 277 aa, Synthetic construct
MMHYVDVGPRDGTPVLFLHGNPTSSYVWRNIIPHVAPTHRCIAPDLIGMGKSGKPDLGYFFDDHVRFMDAFIEALGLEEVVLVIHDWGSALGFHWAKRNPERVKGIAFMEFIRPIPTWDEFPEFARETFQAFRTTDVGRKLIIDHNVFIEGTLRMGVVRPLTEVEMDHYREPFLNPADREPLWRFPNELPIAGEPANIVALVEEYMDWLHQSPVPKLLFWGTPGVLIPPAEAARLAKSLPNCKAVDIGPGLNLLQEDNPDLIGSEIARWLSTLEISG

SEQ ID NO: 3027 - protein, 277 aa, Synthetic construct
MMHYVDVGPRDGTPVLFLHGNPTSSYVWRNIIPHVAPTHRCIAPDLIGMGKSGKPDLGYFFDDHVRFMDAFIEALGLEEVVLVIHDWGSALGFHWAKRNPERVKGIAFMEFIRPIPTWDEWPEFARETFQAFRTTDVGRKLIIDHNVFIEGTLRMGVVRPLTEVEMDHYREPFLNPADREPLWRFPNELPIAGEPANVVALVEEYMDWLHQSPVPKLLFWGTPGVLIPPAEAARLAKSLPNCKAVDIGPGLNLLQEDNPDLIGSEIARWLSTLEISG

SEQ ID NO: 3028 - protein, 277 aa, Synthetic construct
MMHYVDVGPRDGTPVLFLHGNPTSSYVWRNIIPHVAPTHRCIAPDLIGMGKSGKPDLGYFFDDHVRFMDAFIEALGLEEVVLVIHDWGSALGFHWAKRNPERVKGIAFMEFIRPIPTWDEFPEFARETFQAFRTTDVGRKLIIDHNVFIEGTLRMGVVRPLTEVEMDHYREPFLNPADREPLWRFPNELPIAGEPANVVALVEEYMDWLHQSPVPKLLFWGTPGVLIPPAEAARLAKSLPNCKAVDIGPGLNLLQEDNPDLIGSEIARWLSTLEISG

SEQ ID NO: 3029 - protein, 277 aa, Synthetic construct
MMHYVDVGPRDGTPVLFLHGNPTSSYVWRNIIPHVAPTHRCIAPDLIGMGKSGKPDLGYFFDDHVRFMDAFIEALGLEEVVLVIHDWGSALGFHWAKRNPERVKGIAFMEFIRPIPTWDEWPEFARETFQAFRTTDVGRKLIIDHNVFIEGTLRMGVVRPLTEVEMDHYREPFLNPADREPLWRFPNELPIAGEPANIVALVEEYMDWLHQSPVPKLLFWGTPGVLIPPAEAARLAKTLPNCKAVDIGPGLNLLQEDNPDLIGAEIARWLSTLEISG

SEQ ID NO: 3030 - protein, 277 aa, Synthetic construct
MMHYVDEGPRDGTPVLFLHGNPTSSYVWRNIIPHVAPTHRCIAPDLIGMGKSDKPDLGYFFDDHVRFMDAFIEALGLEEVVLVIHDWGSALGFHWAKRNPERVKGIAFMEFIRPIPTWDEFPEFARETFQAFRTTDVGRKLIIDHNVFIEGTLRMGVVRPLTEVEMDHYREPFLNPVDREPLWRFPNELPIAGEPANVVALVEEYMDWLHQSPVPKLLFWGTPGVLIPPAEAARLAKSLPNCKAVDIGPGLNLLQEDNPDLIGSEIARWLSTLEISG

SEQ ID NO: 3031 - protein, 277 aa, Synthetic construct
MMHYVDVGPRDGTPVLFLHGNPTSSYVWRNIIPHVAPTHRCIAPDLIGMGKSDKPDLGYFFDDHVRFMDAFIEALGLEEVVLVIHDWGSALGFHWAKRNPERVKGIAFMEFIRPIPTWDEFPEFARETFQAFRTTDVGRKLIIDHNVFIEGTLRMGVVRPLTEVEMDHYREPFLNPVDREPLWRFPNELPIAGEPANVVALVEEYMDWLHQSPVPKLLFWGTPGVLIPPAEAARLAKSLPNCKAVDIGPGLNLLQEDNPDLIGAEIARWLSTLEISG

SEQ ID NO: 3032 - protein, 277 aa, Synthetic construct
MMHYVDVGPRDGTPVLFLHGNPTSSYVWRNIIPHVAPTHRCIAPDLIGMGKSGKPDLGYFFDDHVRFMDAFIEALGLEEVVLVIHDWGSALGFHWAKRNPERVKGIAFMEFIRPIPTWDEFPEFARETFQAFRTTDVGRKLIIDHNVFIEGTLRMGVVRPLTEVEMDHYREPFLNPVDREPLWRFPNELPIAGEPANVVALVEEYMDWLHQSPVPKLLFWGTPGVLIPPAEAARLAKSLPNCKAVDIGPGLNLLQEDNPDLIGSEIARWLSTLEISG

SEQ ID NO: 3033 - protein, 277 aa, Synthetic construct
MMHYVDVGPRDGTPVLFLHGNPTSSYVWRNIIPHVAPTHRCIAPDLIGMGKSDKPDLGYFFDDHVRFMDAFIEALGLEEVVLVIHDWGSALGFHWAKRNPERVKGIAFMEFIRPIPTWDEFPEFARETFQAFRTTDVGRKLIIDHNVFIEGTLRMGVVRPLTEVEMDHYREPFLNPADREPLWRFPNELPIAGEPANVVALVEEYMDWLHQSPVPKLLFWGTPGVLIPPAEAARLAKSLPNCKAVDIGPGLNLLQEDNPDLIGSEIARWLSTLEISG

SEQ ID NO: 3034-3035 - skipped (2 entries)

SEQ ID NO: 3036 - protein, 14 aa, Synthetic construct
MGVTGWRLCERILA

SEQ ID NO: 3037 - protein, 159 aa, Synthetic construct
MVFTLEDFVGDWRQTAGYNLDQVLEQGGVSSLFQNLGVSVTPIQRIVLSGENGLKIDIHVIIPYEGLSGDQMGQIEKIFKVVYPVDDHHFKVILHYGTLVIDGVTPNMIDYFGRPYEGIAVFDGKKITVTGTLWNGNKIIDERLINPDGSLLFRVTINV

SEQ ID NO: 3038 - protein, 11 aa, Synthetic construct
VSGWRLFKKIS

SEQ ID NO: 3039 - protein, 11 aa, Synthetic construct
VTGYRLFEEIL

SEQ ID NO: 3040 - protein, 170 aa, Synthetic construct
MVFTLDDFVGDWEQTAAYNLDQVLEQGGVSSLLQNLAVSVTPIMRIVRSGENALKIDIHVIIPYEGLSADQMAQIEEVFKVVYPVDDHHFKVILPYGTLVIDGVTPNKLNYFGRPYEGIAVFDGKKITTTGTLWNGNKIIDERLITPDGSMLFRVTINSVSGWRLFKKIS

SEQ ID NO: 3041 - protein, 170 aa, Synthetic construct
MVFTLDDFVGDWEQTAAYNLDQVLEQGGVSSLLQNLAVSVTPIMRIVRSGENALKIDIHVIIPYEGLSADQMAQIEEVFKVVYPVDDHHFKVILPYGTLVIDGVTPNKLNYFGRPYEGIAVFDGKKITTTGTLWNGNKIIDERLITPDGSMLFRVTINSVTGYRLFEEIL

SEQ ID NO: 3042 - protein, 102 aa, Synthetic construct
MVFTLDDFVGDWEQTAAYNLDQVLEQGGVSSLLQNLAVSVTPIMRIVRSGENALKIDIHVIIPYEGLSADQMAQIEEVFKVVYPVDDHHFKVILPYGTLVID

SEQ ID NO: 3043 - protein, 124 aa, Synthetic construct
MVFTLDDFVGDWEQTAAYNLDQVLEQGGVSSLLQNLAVSVTPIMRIVRSGENALKIDIHVIIPYEGLSADQMAQIEEVFKVVYPVDDHHFKVILPYGTLVIDGVTPNKLNYFGRPYEGIAVFDG

SEQ ID NO: 3044 - protein, 133 aa, Synthetic construct
MVFTLDDFVGDWEQTAAYNLDQVLEQGGVSSLLQNLAVSVTPIMRIVRSGENALKIDIHVIIPYEGLSADQMAQIEEVFKVVYPVDDHHFKVILPYGTLVIDGVTPNKLNYFGRPYEGIAVFDGKKITTTGTL

SEQ ID NO: 3045 - protein, 148 aa, Synthetic construct
MVFTLDDFVGDWEQTAAYNLDQVLEQGGVSSLLQNLAVSVTPIMRIVRSGENALKIDIHVIIPYEGLSADQMAQIEEVFKVVYPVDDHHFKVILPYGTLVIDGVTPNKLNYFGRPYEGIAVFDGKKITTTGTLWNGNKIIDERLITPD

SEQ ID NO: 3046 - protein, 68 aa, Synthetic construct
GVTPNKLNYFGRPYEGIAVFDGKKITTTGTLWNGNKIIDERLITPDGSMLFRVTINSVSGWRLFKKIS

SEQ ID NO: 3047 - protein, 46 aa, Synthetic construct
KKITTTGTLWNGNKIIDERLITPDGSMLFRVTINSVSGWRLFKKIS

SEQ ID NO: 3048 - protein, 37 aa, Synthetic construct
WNGNKIIDERLITPDGSMLFRVTINSVSGWRLFKKIS

SEQ ID NO: 3049 - protein, 22 aa, Synthetic construct
GSMLFRVTINSVSGWRLFKKIS

SEQ ID NO: 3050 - protein, 68 aa, Synthetic construct
GVTPNKLNYFGRPYEGIAVFDGKKITTTGTLWNGNKIIDERLITPDGSMLFRVTINSVTGYRLFEEIL

SEQ ID NO: 3051 - protein, 46 aa, Synthetic construct
KKITTTGTLWNGNKIIDERLITPDGSMLFRVTINSVTGYRLFEEIL

SEQ ID NO: 3052 - protein, 37 aa, Synthetic construct
WNGNKIIDERLITPDGSMLFRVTINSVTGYRLFEEIL

SEQ ID NO: 3053 - protein, 22 aa, Synthetic construct
GSMLFRVTINSVTGYRLFEEIL

SEQ ID NO: 3054 - protein, 22 aa, Synthetic construct
GVTPNKLNYFGRPYEGIAVFDG

SEQ ID NO: 3055 - protein, 9 aa, Synthetic construct
KKITTTGTL

SEQ ID NO: 3056 - protein, 15 aa, Synthetic construct
WNGNKIIDERLITPD

SEQ ID NO: 3057 - protein, 11 aa, Synthetic construct
VTGYRLFEEIL

SEQ ID NO: 3058 - protein, 11 aa, Synthetic construct
VSGWRLFKKIS

SEQ ID NO: 3059 - protein, 11 aa, Synthetic construct
GSMLFRVTINS

SEQ ID NO: 3060 - protein, 11 aa, Synthetic construct
VSGWRLFKKIS

SEQ ID NO: 3061 - protein, 17 aa, Synthetic construct
EIGTGFPFDPHYVEVLG

SEQ ID NO: 3062 - protein, 35 aa, Synthetic construct
EIGTGFPFDPHYVEVLGGGSGGVSVSGWRLFKKIS

SEQ ID NO: 3063 - protein, 35 aa, Synthetic construct
VSVSGWRLFKKISGGSGGEIGTGFPFDPHYVEVLG

SEQ ID NO: 3064 - protein, 17 aa, Synthetic construct
ERKTRFPFDPHYVEVLG

SEQ ID NO: 3065 - protein, 17 aa, Synthetic construct
EIGTGFPFRPHYVKVRG

SEQ ID NO: 3066 - protein, 17 aa, Synthetic construct
ERKTRFPFDPHYVEVLR

SEQ ID NO: 3067 - protein, 28 aa, Synthetic construct
EIGTGFPFDPHYVEVLGVSGWRLFKKIS

SEQ ID NO: 3068 - protein, 28 aa, Synthetic construct
EIGTGFPFDPHYVEVLGVSGWRLFKKIS

SEQ ID NO: 3069 - protein, 28 aa, Synthetic construct
EIGTGFPFRPHYVKVRGVSGWRLFKKIS

SEQ ID NO: 3070 - protein, 30 aa, Synthetic construct
ERKTRFPFDPHYVEVLGVSVSGWRLFKKIS

SEQ ID NO: 3071 - protein, 30 aa, Synthetic construct
EIGTGFPFRPHYVKVRGVSVSGWRLFKKIS

SEQ ID NO: 3072 - protein, 30 aa, Synthetic construct
ERKTRFPFDPHYVEVLRVSVSGWRLFKKIS

SEQ ID NO: 3073 - protein, 30 aa, Synthetic construct
EVSEDFPFEPNYIEVLGVSVSGWRLFKKIS

SEQ ID NO: 3074 - protein, 30 aa, Synthetic construct
ERSSTFPFEEHYVEVLGVSVSGWRLFKKIS

SEQ ID NO: 3075 - protein, 30 aa, Synthetic construct
EISSDFPFKSHYVEVLGVSVSGWRLFKKIS

SEQ ID NO: 3076 - protein, 30 aa, Synthetic construct
EKSTEFPFKDHFVRCLGVSVSGWRLFKKIS

SEQ ID NO: 3077 - protein, 30 aa, Synthetic construct
KFNDQWNYRANFLKIRRVSVSGWRLFKKIS

SEQ ID NO: 3078 - protein, 30 aa, Synthetic construct
EIGTGFPFDPHYVEVLGVSVSGWRLFKKIS

SEQ ID NO: 3079 - protein, 17 aa, Synthetic construct
KFNDQWNYRANFLKIRR

SEQ ID NO: 3080 - protein, 16 aa, Synthetic construct
KGTGFPFDPHYVEVLG

SEQ ID NO: 3081 - protein, 17 aa, Synthetic construct
ERKTRFPFRPHYVKVRR

SEQ ID NO: 3082 - protein, 17 aa, Synthetic construct
KFNDQFNFRANYVKVRR

SEQ ID NO: 3083 - protein, 17 aa, Synthetic construct
EIGTGFPFRPHYVKVRR

SEQ ID NO: 3084 - protein, 17 aa, Synthetic construct
EIGTGFPFRPHYVKVLR

SEQ ID NO: 3085 - protein, 17 aa, Synthetic construct
EIGTGFPFRPHYVRVLG

SEQ ID NO: 3086 - protein, 17 aa, Synthetic construct
EIGTGFPFRPHYVEVLG

SEQ ID NO: 3087 - protein, 17 aa, Synthetic construct
EFGDQFPFDPHYVEVLG

SEQ ID NO: 3088 - protein, 17 aa, Synthetic construct
EINDGFPFDPNYVEVLG

SEQ ID NO: 3089 - protein, 17 aa, Synthetic construct
EIGTGWPYDPHYVEVLG

SEQ ID NO: 3090 - protein, 17 aa, Synthetic construct
EIGTEFQFDEHYVEVLG

SEQ ID NO: 3091 - protein, 17 aa, Synthetic construct
EIDTEWPYDEHYIEILG

SEQ ID NO: 3092 - protein, 34 aa, Synthetic construct
EIGTGFPFDPHYVEVLGGGSGVSVSGWRLFKKIS

SEQ ID NO: 3093 - protein, 13 aa, Synthetic construct
VSVSGWRLFKKIS

SEQ ID NO: 3094 - protein, 34 aa, Synthetic construct
ERGTGFPFDPHYVEVLGGGSGVSVSGWRLFKKIS

SEQ ID NO: 3095 - protein, 34 aa, Synthetic construct
EIKTGFPFDPHYVEVLGGGSGVSVSGWRLFKKIS

SEQ ID NO: 3096 - protein, 34 aa, Synthetic construct
EIGTRFPFDPHYVEVLGGGSGVSVSGWRLFKKIS

SEQ ID NO: 3097 - protein, 34 aa, Synthetic construct
EIGTGFPFRPHYVEVLGGGSGVSVSGWRLFKKIS

SEQ ID NO: 3098 - protein, 34 aa, Synthetic construct
EIGTGFPFDPHYVKVLGGGSGVSVSGWRLFKKIS

SEQ ID NO: 3099 - protein, 34 aa, Synthetic construct
EIGTGFPFDPHYVEVRGGGSGVSVSGWRLFKKIS

SEQ ID NO: 3100 - protein, 34 aa, Synthetic construct
EIGTGFPFDPHYVEVLRGGSGVSVSGWRLFKKIS

SEQ ID NO: 3101 - protein, 34 aa, Synthetic construct
ERKTGFPFDPHYVEVLGGGSGVSVSGWRLFKKIS

SEQ ID NO: 3102 - protein, 34 aa, Synthetic construct
ERGTRFPFDPHYVEVLGGGSGVSVSGWRLFKKIS

SEQ ID NO: 3103 - protein, 34 aa, Synthetic construct
EIGTGFPFRPHYVKVLGGGSGVSVSGWRLFKKIS

SEQ ID NO: 3104 - protein, 34 aa, Synthetic construct
EIGTGFPFRPHYVEVRGGGSGVSVSGWRLFKKIS

SEQ ID NO: 3105 - protein, 34 aa, Synthetic construct
ERGTGFPFRPHYVEVLGGGSGVSVSGWRLFKKIS

SEQ ID NO: 3106 - protein, 34 aa, Synthetic construct
ERGTGFPFDPHYVEVLRGGSGVSVSGWRLFKKIS

SEQ ID NO: 3107 - protein, 34 aa, Synthetic construct
EIKTGFPFDPHYVKVLGGGSGVSVSGWRLFKKIS

SEQ ID NO: 3108 - protein, 34 aa, Synthetic construct
EIKTGFPFDPHYVEVRGGGSGVSVSGWRLFKKIS

SEQ ID NO: 3109 - protein, 34 aa, Synthetic construct
EIGTRFPFDPHYVEVLRGGSGVSVSGWRLFKKIS

SEQ ID NO: 3110 - protein, 448 aa, Synthetic construct
MLHYVDVGPRDGTPVLFLHGNPTSSYVWRNIIPHVAPTHRCIAPDLIGFGKSDKPDLGYFFDDHVRFMDAFIEALGLEEVVLVIHDWGSALGFHWAKRNPERVKGIAFMEFIRPIPTWDEWPEFARETFQAFRTTDVGRKLIIDQNVFIEGTLPMGVVRPLTEVEMDHYREPFLNPVDREPLWRFPNELPIAGEPANIVALVEEYMDWLHQSPVPKLLFWGTPGVLIPPAEAARLAKSLPNCKAVDIGPGLNLLQEDNPDLIGSEIARWLSTLEISGGSGGSGGGGSGGMVFTLEDFVGDWEQTAAYNLDQVLEQGGVSSLLQNLAVSVTPIQRIVRSGENALKIDIHVIIPYEGLSADQMAQIEEVFKVVYPVDDHHFKVILPYGTLVIDGVTPNMLNYFGRPYEGIAVFDGKKITVTGTLWNGNKIIDERLITPDGSMLFRVTINS

SEQ ID NO: 3111 - protein, 448 aa, Synthetic construct
MLHYVDVGPRDGTPVLFLHGNPTSSYVWRNIIPHVAPTHRCIAPDLIGMGKSSKPDLGYFFDDHVRFMDAFIEALGLEEVVLVIHDWGSALGFHWAKRNPERVKGIAFMEFIRPIPTWDEWPEFARETFQAFRTTDVGRKLIIDQNVFIEGTLPMGVVRPLTEVEMDHYREPFLNPVDREPLWRFPNELPIAGEPANIVALVEEYMDWLHQSPVPKLLFWGTPGVLIPPAEAARLAKSLPNCKAVDIGPGLNLLQEDNPDLIGSEIARWLSTLEISGGSGGSGGGGSGGMVFTLEDFVGDWEQTAAYNLDQVLEQGGVSSLLQNLAVSVTPIQRIVRSGENALKIDIHVIIPYEGLSADQMAQIEEVFKVVYPVDDHHFKVILPYGTLVIDGVTPNMLNYFGRPYEGIAVFDGKKITVTGTLWNGNKIIDERLITPDGSMLFRVTINS

SEQ ID NO: 3112 - protein, 448 aa, Synthetic construct
MLHYVDVGPRDGTPVLFLHGNPTSSYVWRNIIPHVAPTHRCIAPDLIGMGKSGKPDLGYFFDDHVRFMDAFIEALGLEEVVLVIHDWGSALGFHWAKRNPERVKGIAFMEFIRPIPTWDEWPEFARETFQAFRTTDVGRKLIIDQNVFIEGTLPMGVVRPLTEVEMDHYREPFLNPVDREPLWRFPNELPIAGEPANIVALVEEYMDWLHQSPVPKLLFWGTPGVLIPPAEAARLAKSLPNCKAVDIGPGLNLLQEDNPDLIGSEIARWLSTLEISGGSGGSGGGGSGGMVFTLEDFVGDWEQTAAYNLDQVLEQGGVSSLLQNLAVSVTPIQRIVRSGENALKIDIHVIIPYEGLSADQMAQIEEVFKVVYPVDDHHFKVILPYGTLVIDGVTPNMLNYFGRPYEGIAVFDGKKITVTGTLWNGNKIIDERLITPDGSMLFRVTINS

SEQ ID NO: 3113 - protein, 448 aa, Synthetic construct
MLHYVDVGPRDGTPVLFLHGNPTSSYVWRNIIPHVAPTHRCIAPDLIGMGKSDKPPLGYFFDDHVRFMDAFIEALGLEEVVLVIHDWGSALGFHWAKRNPERVKGIAFMEFIRPIPTWDEWPEFARETFQAFRTTDVGRKLIIDQNVFIEGTLPMGVVRPLTEVEMDHYREPFLNPVDREPLWRFPNELPIAGEPANIVALVEEYMDWLHQSPVPKLLFWGTPGVLIPPAEAARLAKSLPNCKAVDIGPGLNLLQEDNPDLIGSEIARWLSTLEISGGSGGSGGGGSGGMVFTLEDFVGDWEQTAAYNLDQVLEQGGVSSLLQNLAVSVTPIQRIVRSGENALKIDIHVIIPYEGLSADQMAQIEEVFKVVYPVDDHHFKVILPYGTLVIDGVTPNMLNYFGRPYEGIAVFDGKKITVTGTLWNGNKIIDERLITPDGSMLFRVTINS

SEQ ID NO: 3114 - protein, 448 aa, Synthetic construct
MLHYVDVGPRDGTPVLFLHGNPTSSYVWRNIIPHVAPTHRCIAPDLIGMGKSDKPDIGYFFDDHVRFMDAFIEALGLEEVVLVIHDWGSALGFHWAKRNPERVKGIAFMEFIRPIPTWDEWPEFARETFQAFRTTDVGRKLIIDQNVFIEGTLPMGVVRPLTEVEMDHYREPFLNPVDREPLWRFPNELPIAGEPANIVALVEEYMDWLHQSPVPKLLFWGTPGVLIPPAEAARLAKSLPNCKAVDIGPGLNLLQEDNPDLIGSEIARWLSTLEISGGSGGSGGGGSGGMVFTLEDFVGDWEQTAAYNLDQVLEQGGVSSLLQNLAVSVTPIQRIVRSGENALKIDIHVIIPYEGLSADQMAQIEEVFKVVYPVDDHHFKVILPYGTLVIDGVTPNMLNYFGRPYEGIAVFDGKKITVTGTLWNGNKIIDERLITPDGSMLFRVTINS

SEQ ID NO: 3115 - protein, 448 aa, Synthetic construct
MLHYVDVGPRDGTPVLFLHGNPTSSYVWRNIIPHVAPTHRCIAPDLIGMGKSDKPDLGYFFDDHVRFMDAFIEALGLEKVVLVIHDWGSALGFHWAKRNPERVKGIAFMEFIRPIPTWDEWPEFARETFQAFRTTDVGRKLIIDQNVFIEGTLPMGVVRPLTEVEMDHYREPFLNPVDREPLWRFPNELPIAGEPANIVALVEEYMDWLHQSPVPKLLFWGTPGVLIPPAEAARLAKSLPNCKAVDIGPGLNLLQEDNPDLIGSEIARWLSTLEISGGSGGSGGGGSGGMVFTLEDFVGDWEQTAAYNLDQVLEQGGVSSLLQNLAVSVTPIQRIVRSGENALKIDIHVIIPYEGLSADQMAQIEEVFKVVYPVDDHHFKVILPYGTLVIDGVTPNMLNYFGRPYEGIAVFDGKKITVTGTLWNGNKIIDERLITPDGSMLFRVTINS

SEQ ID NO: 3116 - protein, 448 aa, Synthetic construct
MLHYVDVGPRDGTPVLFLHGNPTSSYVWRNIIPHVAPTHRCIAPDLIGMGKSDKPDLGYFFDDHVRFMDAFIEALGLEEVVLVIHDWGAALGFHWAKRNPERVKGIAFMEFIRPIPTWDEWPEFARETFQAFRTTDVGRKLIIDQNVFIEGTLPMGVVRPLTEVEMDHYREPFLNPVDREPLWRFPNELPIAGEPANIVALVEEYMDWLHQSPVPKLLFWGTPGVLIPPAEAARLAKSLPNCKAVDIGPGLNLLQEDNPDLIGSEIARWLSTLEISGGSGGSGGGGSGGMVFTLEDFVGDWEQTAAYNLDQVLEQGGVSSLLQNLAVSVTPIQRIVRSGENALKIDIHVIIPYEGLSADQMAQIEEVFKVVYPVDDHHFKVILPYGTLVIDGVTPNMLNYFGRPYEGIAVFDGKKITVTGTLWNGNKIIDERLITPDGSMLFRVTINS

SEQ ID NO: 3117 - protein, 448 aa, Synthetic construct
MLHYVDVGPRDGTPVLFLHGNPTSSYVWRNIIPHVAPTHRCIAPDLIGMGKSDKPDLGYFFDDHVRFMDAFIEALGLEEVVLVIHDWGSALGLHWAKRNPERVKGIAFMEFIRPIPTWDEWPEFARETFQAFRTTDVGRKLIIDQNVFIEGTLPMGVVRPLTEVEMDHYREPFLNPVDREPLWRFPNELPIAGEPANIVALVEEYMDWLHQSPVPKLLFWGTPGVLIPPAEAARLAKSLPNCKAVDIGPGLNLLQEDNPDLIGSEIARWLSTLEISGGSGGSGGGGSGGMVFTLEDFVGDWEQTAAYNLDQVLEQGGVSSLLQNLAVSVTPIQRIVRSGENALKIDIHVIIPYEGLSADQMAQIEEVFKVVYPVDDHHFKVILPYGTLVIDGVTPNMLNYFGRPYEGIAVFDGKKITVTGTLWNGNKIIDERLITPDGSMLFRVTINS

SEQ ID NO: 3118 - protein, 448 aa, Synthetic construct
MLHYVDVGPRDGTPVLFLHGNPTSSYVWRNIIPHVAPTHRCIAPDLIGMGKSDKPDLGYFFDDHVRFMDAFIEALGLEEVVLVIHDWGSALGFHWAKRNPERVKGIAFMEFIRPIPTWDEWPEFAREMFQAFRTTDVGRKLIIDQNVFIEGTLPMGVVRPLTEVEMDHYREPFLNPVDREPLWRFPNELPIAGEPANIVALVEEYMDWLHQSPVPKLLFWGTPGVLIPPAEAARLAKSLPNCKAVDIGPGLNLLQEDNPDLIGSEIARWLSTLEISGGSGGSGGGGSGGMVFTLEDFVGDWEQTAAYNLDQVLEQGGVSSLLQNLAVSVTPIQRIVRSGENALKIDIHVIIPYEGLSADQMAQIEEVFKVVYPVDDHHFKVILPYGTLVIDGVTPNMLNYFGRPYEGIAVFDGKKITVTGTLWNGNKIIDERLITPDGSMLFRVTINS

SEQ ID NO: 3119 - protein, 448 aa, Synthetic construct
MLHYVDVGPRDGTPVLFLHGNPTSSYVWRNIIPHVAPTHRCIAPDLIGMGKSDKPDLGYFFDDHVRFMDAFIEALGLEEVVLVIHDWGSALGFHWAKRNPERVKGIAFMEFIRPIPTWDEWPEFARETFQQFRTTDVGRKLIIDQNVFIEGTLPMGVVRPLTEVEMDHYREPFLNPVDREPLWRFPNELPIAGEPANIVALVEEYMDWLHQSPVPKLLFWGTPGVLIPPAEAARLAKSLPNCKAVDIGPGLNLLQEDNPDLIGSEIARWLSTLEISGGSGGSGGGGSGGMVFTLEDFVGDWEQTAAYNLDQVLEQGGVSSLLQNLAVSVTPIQRIVRSGENALKIDIHVIIPYEGLSADQMAQIEEVFKVVYPVDDHHFKVILPYGTLVIDGVTPNMLNYFGRPYEGIAVFDGKKITVTGTLWNGNKIIDERLITPDGSMLFRVTINS

SEQ ID NO: 3120 - protein, 448 aa, Synthetic construct
MLHYVDVGPRDGTPVLFLHGNPTSSYVWRNIIPHVAPTHRCIAPDLIGMGKSDKPDLGYFFDDHVRFMDAFIEALGLEEVVLVIHDWGSALGFHWAKRNPERVKGIAFMEFIRPIPTWDEWPEFARETFQAFRTEDVGRKLIIDQNVFIEGTLPMGVVRPLTEVEMDHYREPFLNPVDREPLWRFPNELPIAGEPANIVALVEEYMDWLHQSPVPKLLFWGTPGVLIPPAEAARLAKSLPNCKAVDIGPGLNLLQEDNPDLIGSEIARWLSTLEISGGSGGSGGGGSGGMVFTLEDFVGDWEQTAAYNLDQVLEQGGVSSLLQNLAVSVTPIQRIVRSGENALKIDIHVIIPYEGLSADQMAQIEEVFKVVYPVDDHHFKVILPYGTLVIDGVTPNMLNYFGRPYEGIAVFDGKKITVTGTLWNGNKIIDERLITPDGSMLFRVTINS

SEQ ID NO: 3121 - protein, 448 aa, Synthetic construct
MLHYVDVGPRDGTPVLFLHGNPTSSYVWRNIIPHVAPTHRCIAPDLIGMGKSDKPDLGYFFDDHVRFMDAFIEALGLEEVVLVIHDWGSALGFHWAKRNPERVKGIAFMEFIRPIPTWDEWPEFARETFQAFRTTDVGRKLIIDQNVMIEGTLPMGVVRPLTEVEMDHYREPFLNPVDREPLWRFPNELPIAGEPANIVALVEEYMDWLHQSPVPKLLFWGTPGVLIPPAEAARLAKSLPNCKAVDIGPGLNLLQEDNPDLIGSEIARWLSTLEISGGSGGSGGGGSGGMVFTLEDFVGDWEQTAAYNLDQVLEQGGVSSLLQNLAVSVTPIQRIVRSGENALKIDIHVIIPYEGLSADQMAQIEEVFKVVYPVDDHHFKVILPYGTLVIDGVTPNMLNYFGRPYEGIAVFDGKKITVTGTLWNGNKIIDERLITPDGSMLFRVTINS

SEQ ID NO: 3122 - protein, 448 aa, Synthetic construct
MLHYVDVGPRDGTPVLFLHGNPTSSYVWRNIIPHVAPTHRCIAPDLIGMGKSDKPDLGYFFDDHVRFMDAFIEALGLEEVVLVIHDWGSALGFHWAKRNPERVKGIAFMEFIRPIPTWDEWPEFARETFQAFRTTDVGRKLIIDQNVFIEGTLPMGVVRPLTEVEMDHYREPFLNPEDREPLWRFPNELPIAGEPANIVALVEEYMDWLHQSPVPKLLFWGTPGVLIPPAEAARLAKSLPNCKAVDIGPGLNLLQEDNPDLIGSEIARWLSTLEISGGSGGSGGGGSGGMVFTLEDFVGDWEQTAAYNLDQVLEQGGVSSLLQNLAVSVTPIQRIVRSGENALKIDIHVIIPYEGLSADQMAQIEEVFKVVYPVDDHHFKVILPYGTLVIDGVTPNMLNYFGRPYEGIAVFDGKKITVTGTLWNGNKIIDERLITPDGSMLFRVTINS

SEQ ID NO: 3123 - protein, 448 aa, Synthetic construct
MLHYVDVGPRDGTPVLFLHGNPTSSYVWRNIIPHVAPTHRCIAPDLIGMGKSDKPDLGYFFDDHVRFMDAFIEALGLEEVVLVIHDWGSALGFHWAKRNPERVKGIAFMEFIRPIPTWDEWPEFARETFQAFRTTDVGRKLIIDQNVFIEGTLPMGVVRPLTEVEMDHYREPFLNPQDREPLWRFPNELPIAGEPANIVALVEEYMDWLHQSPVPKLLFWGTPGVLIPPAEAARLAKSLPNCKAVDIGPGLNLLQEDNPDLIGSEIARWLSTLEISGGSGGSGGGGSGGMVFTLEDFVGDWEQTAAYNLDQVLEQGGVSSLLQNLAVSVTPIQRIVRSGENALKIDIHVIIPYEGLSADQMAQIEEVFKVVYPVDDHHFKVILPYGTLVIDGVTPNMLNYFGRPYEGIAVFDGKKITVTGTLWNGNKIIDERLITPDGSMLFRVTINS

SEQ ID NO: 3124 - protein, 448 aa, Synthetic construct
MLHYVDVGPRDGTPVLFLHGNPTSSYVWRNIIPHVAPTHRCIAPDLIGMGKSDKPDLGYFFDDHVRFMDAFIEALGLEEVVLVIHDWGSALGFHWAKRNPERVKGIAFMEFIRPIPTWDEWPEFARETFQAFRTTDVGRKLIIDQNVFIEGTLPMGVVRPLTEVEMDHYREPFLNPVDREPLWRFANELPIAGEPANIVALVEEYMDWLHQSPVPKLLFWGTPGVLIPPAEAARLAKSLPNCKAVDIGPGLNLLQEDNPDLIGSEIARWLSTLEISGGSGGSGGGGSGGMVFTLEDFVGDWEQTAAYNLDQVLEQGGVSSLLQNLAVSVTPIQRIVRSGENALKIDIHVIIPYEGLSADQMAQIEEVFKVVYPVDDHHFKVILPYGTLVIDGVTPNMLNYFGRPYEGIAVFDGKKITVTGTLWNGNKIIDERLITPDGSMLFRVTINS

SEQ ID NO: 3125 - protein, 448 aa, Synthetic construct
MLHYVDVGPRDGTPVLFLHGNPTSSYVWRNIIPHVAPTHRCIAPDLIGMGKSDKPDLGYFFDDHVRFMDAFIEALGLEEVVLVIHDWGSALGFHWAKRNPERVKGIAFMEFIRPIPTWDEWPEFARETFQAFRTTDVGRKLIIDQNVFIEGTLPMGVVRPLTEVEMDHYREPFLNPVDREPLWRFVNELPIAGEPANIVALVEEYMDWLHQSPVPKLLFWGTPGVLIPPAEAARLAKSLPNCKAVDIGPGLNLLQEDNPDLIGSEIARWLSTLEISGGSGGSGGGGSGGMVFTLEDFVGDWEQTAAYNLDQVLEQGGVSSLLQNLAVSVTPIQRIVRSGENALKIDIHVIIPYEGLSADQMAQIEEVFKVVYPVDDHHFKVILPYGTLVIDGVTPNMLNYFGRPYEGIAVFDGKKITVTGTLWNGNKIIDERLITPDGSMLFRVTINS

SEQ ID NO: 3126 - protein, 448 aa, Synthetic construct
MLHYVDVGPRDGTPVLFLHGNPTSSYVWRNIIPHVAPTHRCIAPDLIGMGKSDKPDLGYFFDDHVRFMDAFIEALGLEEVVLVIHDWGSALGFHWAKRNPERVKGIAFMEFIRPIPTWDEWPEFARETFQAFRTTDVGRKLIIDQNVFIEGTLPMGVVRPLTEVEMDHYREPFLNPVDREPLWRFPNELPIAGEPANIVALVEEYMDWLHQSPVPKLLFWGTPGVLIPPAEAARLAKALPNCKAVDIGPGLNLLQEDNPDLIGSEIARWLSTLEISGGSGGSGGGGSGGMVFTLEDFVGDWEQTAAYNLDQVLEQGGVSSLLQNLAVSVTPIQRIVRSGENALKIDIHVIIPYEGLSADQMAQIEEVFKVVYPVDDHHFKVILPYGTLVIDGVTPNMLNYFGRPYEGIAVFDGKKITVTGTLWNGNKIIDERLITPDGSMLFRVTINS

SEQ ID NO: 3127 - protein, 448 aa, Synthetic construct
MLHYVDVGPRDGTPVLFLHGNPTSSYVWRNIIPHVAPTHRCIAPDLIGMGKSDKPDLGYFFDDHVRFMDAFIEALGLEEVVLVIHDWGSALGFHWAKRNPERVKGIAFMEFIRPIPTWDEWPEFARETFQAFRTTDVGRKLIIDQNVFIEGTLPMGVVRPLTEVEMDHYREPFLNPVDREPLWRFPNELPIAGEPANIVALVEEYMDWLHQSPVPKLLFWGTPGVLIPPAEAARLAKSLPNCKAVDIGPGLNILQEDNPDLIGSEIARWLSTLEISGGSGGSGGGGSGGMVFTLEDFVGDWEQTAAYNLDQVLEQGGVSSLLQNLAVSVTPIQRIVRSGENALKIDIHVIIPYEGLSADQMAQIEEVFKVVYPVDDHHFKVILPYGTLVIDGVTPNMLNYFGRPYEGIAVFDGKKITVTGTLWNGNKIIDERLITPDGSMLFRVTINS

SEQ ID NO: 3128 - protein, 448 aa, Synthetic construct
MFHYVDVGPRDGTPVLFLHGNPTSSYVWRNIIPHVAPTHRCIAPDLIGFGKSSKPDLGYFFDDHVRFMDAFIEALGLEEVVLVIHDWGSALGFHWAKRNPERVKGIAFMEFIRPIPTWDEWPEFARETFQAFRTTDVGRKLIIDQNVFIEGTLPMGVVRPLTEVEMDHYREPFLNPVDREPLWRFPNELPIAGEPANIVALVEEYMDWLHQSPVPKLLFWGTPGVLIPPAEAARLAKSLPNCKAVDIGPGLNLLQEDNPDLIGSEIARWLSTLEISGGSGGSGGGGSGGMVFTLEDFVGDWEQTAAYNLDQVLEQGGVSSLLQNLAVSVTPIQRIVRSGENALKIDIHVIIPYEGLSADQMAQIEEVFKVVYPVDDHHFKVILPYGTLVIDGVTPNMLNYFGRPYEGIAVFDGKKITVTGTLWNGNKIIDERLITPDGSMLFRVTINS

SEQ ID NO: 3129 - protein, 448 aa, Synthetic construct
MFHYVDVGPRDGTPVLFLHGNPTSSYVWRNIIPHVAPTHRCIAPDLIGFGKSGKPDLGYFFDDHVRFMDAFIEALGLEEVVLVIHDWGSALGFHWAKRNPERVKGIAFMEFIRPIPTWDEWPEFARETFQAFRTTDVGRKLIIDQNVFIEGTLPMGVVRPLTEVEMDHYREPFLNPVDREPLWRFPNELPIAGEPANIVALVEEYMDWLHQSPVPKLLFWGTPGVLIPPAEAARLAKSLPNCKAVDIGPGLNLLQEDNPDLIGSEIARWLSTLEISGGSGGSGGGGSGGMVFTLEDFVGDWEQTAAYNLDQVLEQGGVSSLLQNLAVSVTPIQRIVRSGENALKIDIHVIIPYEGLSADQMAQIEEVFKVVYPVDDHHFKVILPYGTLVIDGVTPNMLNYFGRPYEGIAVFDGKKITVTGTLWNGNKIIDERLITPDGSMLFRVTINS

SEQ ID NO: 3130 - protein, 448 aa, Synthetic construct
MFHYVDVGPRDGTPVLFLHGNPTSSYVWRNIIPHVAPTHRCIAPDLIGFGKSDKPPLGYFFDDHVRFMDAFIEALGLEEVVLVIHDWGSALGFHWAKRNPERVKGIAFMEFIRPIPTWDEWPEFARETFQAFRTTDVGRKLIIDQNVFIEGTLPMGVVRPLTEVEMDHYREPFLNPVDREPLWRFPNELPIAGEPANIVALVEEYMDWLHQSPVPKLLFWGTPGVLIPPAEAARLAKSLPNCKAVDIGPGLNLLQEDNPDLIGSEIARWLSTLEISGGSGGSGGGGSGGMVFTLEDFVGDWEQTAAYNLDQVLEQGGVSSLLQNLAVSVTPIQRIVRSGENALKIDIHVIIPYEGLSADQMAQIEEVFKVVYPVDDHHFKVILPYGTLVIDGVTPNMLNYFGRPYEGIAVFDGKKITVTGTLWNGNKIIDERLITPDGSMLFRVTINS

SEQ ID NO: 3131 - protein, 448 aa, Synthetic construct
MFHYVDVGPRDGTPVLFLHGNPTSSYVWRNIIPHVAPTHRCIAPDLIGFGKSDKPDIGYFFDDHVRFMDAFIEALGLEEVVLVIHDWGSALGFHWAKRNPERVKGIAFMEFIRPIPTWDEWPEFARETFQAFRTTDVGRKLIIDQNVFIEGTLPMGVVRPLTEVEMDHYREPFLNPVDREPLWRFPNELPIAGEPANIVALVEEYMDWLHQSPVPKLLFWGTPGVLIPPAEAARLAKSLPNCKAVDIGPGLNLLQEDNPDLIGSEIARWLSTLEISGGSGGSGGGGSGGMVFTLEDFVGDWEQTAAYNLDQVLEQGGVSSLLQNLAVSVTPIQRIVRSGENALKIDIHVIIPYEGLSADQMAQIEEVFKVVYPVDDHHFKVILPYGTLVIDGVTPNMLNYFGRPYEGIAVFDGKKITVTGTLWNGNKIIDERLITPDGSMLFRVTINS

SEQ ID NO: 3132 - protein, 448 aa, Synthetic construct
MFHYVDVGPRDGTPVLFLHGNPTSSYVWRNIIPHVAPTHRCIAPDLIGFGKSDKPDLGYFFDDHVRFMDAFIEALGLEKVVLVIHDWGSALGFHWAKRNPERVKGIAFMEFIRPIPTWDEWPEFARETFQAFRTTDVGRKLIIDQNVFIEGTLPMGVVRPLTEVEMDHYREPFLNPVDREPLWRFPNELPIAGEPANIVALVEEYMDWLHQSPVPKLLFWGTPGVLIPPAEAARLAKSLPNCKAVDIGPGLNLLQEDNPDLIGSEIARWLSTLEISGGSGGSGGGGSGGMVFTLEDFVGDWEQTAAYNLDQVLEQGGVSSLLQNLAVSVTPIQRIVRSGENALKIDIHVIIPYEGLSADQMAQIEEVFKVVYPVDDHHFKVILPYGTLVIDGVTPNMLNYFGRPYEGIAVFDGKKITVTGTLWNGNKIIDERLITPDGSMLFRVTINS

SEQ ID NO: 3133 - protein, 448 aa, Synthetic construct
MFHYVDVGPRDGTPVLFLHGNPTSSYVWRNIIPHVAPTHRCIAPDLIGFGKSDKPDLGYFFDDHVRFMDAFIEALGLEEVVLVIHDWGAALGFHWAKRNPERVKGIAFMEFIRPIPTWDEWPEFARETFQAFRTTDVGRKLIIDQNVFIEGTLPMGVVRPLTEVEMDHYREPFLNPVDREPLWRFPNELPIAGEPANIVALVEEYMDWLHQSPVPKLLFWGTPGVLIPPAEAARLAKSLPNCKAVDIGPGLNLLQEDNPDLIGSEIARWLSTLEISGGSGGSGGGGSGGMVFTLEDFVGDWEQTAAYNLDQVLEQGGVSSLLQNLAVSVTPIQRIVRSGENALKIDIHVIIPYEGLSADQMAQIEEVFKVVYPVDDHHFKVILPYGTLVIDGVTPNMLNYFGRPYEGIAVFDGKKITVTGTLWNGNKIIDERLITPDGSMLFRVTINS

SEQ ID NO: 3134 - protein, 448 aa, Synthetic construct
MFHYVDVGPRDGTPVLFLHGNPTSSYVWRNIIPHVAPTHRCIAPDLIGFGKSDKPDLGYFFDDHVRFMDAFIEALGLEEVVLVIHDWGSALGLHWAKRNPERVKGIAFMEFIRPIPTWDEWPEFARETFQAFRTTDVGRKLIIDQNVFIEGTLPMGVVRPLTEVEMDHYREPFLNPVDREPLWRFPNELPIAGEPANIVALVEEYMDWLHQSPVPKLLFWGTPGVLIPPAEAARLAKSLPNCKAVDIGPGLNLLQEDNPDLIGSEIARWLSTLEISGGSGGSGGGGSGGMVFTLEDFVGDWEQTAAYNLDQVLEQGGVSSLLQNLAVSVTPIQRIVRSGENALKIDIHVIIPYEGLSADQMAQIEEVFKVVYPVDDHHFKVILPYGTLVIDGVTPNMLNYFGRPYEGIAVFDGKKITVTGTLWNGNKIIDERLITPDGSMLFRVTINS

SEQ ID NO: 3135 - protein, 448 aa, Synthetic construct
MFHYVDVGPRDGTPVLFLHGNPTSSYVWRNIIPHVAPTHRCIAPDLIGFGKSDKPDLGYFFDDHVRFMDAFIEALGLEEVVLVIHDWGSALGFHWAKRNPERVKGIAFMEFIRPIPTWDEWPEFAREMFQAFRTTDVGRKLIIDQNVFIEGTLPMGVVRPLTEVEMDHYREPFLNPVDREPLWRFPNELPIAGEPANIVALVEEYMDWLHQSPVPKLLFWGTPGVLIPPAEAARLAKSLPNCKAVDIGPGLNLLQEDNPDLIGSEIARWLSTLEISGGSGGSGGGGSGGMVFTLEDFVGDWEQTAAYNLDQVLEQGGVSSLLQNLAVSVTPIQRIVRSGENALKIDIHVIIPYEGLSADQMAQIEEVFKVVYPVDDHHFKVILPYGTLVIDGVTPNMLNYFGRPYEGIAVFDGKKITVTGTLWNGNKIIDERLITPDGSMLFRVTINS

SEQ ID NO: 3136 - protein, 448 aa, Synthetic construct
MFHYVDVGPRDGTPVLFLHGNPTSSYVWRNIIPHVAPTHRCIAPDLIGFGKSDKPDLGYFFDDHVRFMDAFIEALGLEEVVLVIHDWGSALGFHWAKRNPERVKGIAFMEFIRPIPTWDEWPEFARETFQQFRTTDVGRKLIIDQNVFIEGTLPMGVVRPLTEVEMDHYREPFLNPVDREPLWRFPNELPIAGEPANIVALVEEYMDWLHQSPVPKLLFWGTPGVLIPPAEAARLAKSLPNCKAVDIGPGLNLLQEDNPDLIGSEIARWLSTLEISGGSGGSGGGGSGGMVFTLEDFVGDWEQTAAYNLDQVLEQGGVSSLLQNLAVSVTPIQRIVRSGENALKIDIHVIIPYEGLSADQMAQIEEVFKVVYPVDDHHFKVILPYGTLVIDGVTPNMLNYFGRPYEGIAVFDGKKITVTGTLWNGNKIIDERLITPDGSMLFRVTINS

SEQ ID NO: 3137 - protein, 448 aa, Synthetic construct
MFHYVDVGPRDGTPVLFLHGNPTSSYVWRNIIPHVAPTHRCIAPDLIGFGKSDKPDLGYFFDDHVRFMDAFIEALGLEEVVLVIHDWGSALGFHWAKRNPERVKGIAFMEFIRPIPTWDEWPEFARETFQAFRTEDVGRKLIIDQNVFIEGTLPMGVVRPLTEVEMDHYREPFLNPVDREPLWRFPNELPIAGEPANIVALVEEYMDWLHQSPVPKLLFWGTPGVLIPPAEAARLAKSLPNCKAVDIGPGLNLLQEDNPDLIGSEIARWLSTLEISGGSGGSGGGGSGGMVFTLEDFVGDWEQTAAYNLDQVLEQGGVSSLLQNLAVSVTPIQRIVRSGENALKIDIHVIIPYEGLSADQMAQIEEVFKVVYPVDDHHFKVILPYGTLVIDGVTPNMLNYFGRPYEGIAVFDGKKITVTGTLWNGNKIIDERLITPDGSMLFRVTINS

SEQ ID NO: 3138 - protein, 448 aa, Synthetic construct
MFHYVDVGPRDGTPVLFLHGNPTSSYVWRNIIPHVAPTHRCIAPDLIGFGKSDKPDLGYFFDDHVRFMDAFIEALGLEEVVLVIHDWGSALGFHWAKRNPERVKGIAFMEFIRPIPTWDEWPEFARETFQAFRTTDVGRKLIIDQNVMIEGTLPMGVVRPLTEVEMDHYREPFLNPVDREPLWRFPNELPIAGEPANIVALVEEYMDWLHQSPVPKLLFWGTPGVLIPPAEAARLAKSLPNCKAVDIGPGLNLLQEDNPDLIGSEIARWLSTLEISGGSGGSGGGGSGGMVFTLEDFVGDWEQTAAYNLDQVLEQGGVSSLLQNLAVSVTPIQRIVRSGENALKIDIHVIIPYEGLSADQMAQIEEVFKVVYPVDDHHFKVILPYGTLVIDGVTPNMLNYFGRPYEGIAVFDGKKITVTGTLWNGNKIIDERLITPDGSMLFRVTINS

SEQ ID NO: 3139 - protein, 448 aa, Synthetic construct
MFHYVDVGPRDGTPVLFLHGNPTSSYVWRNIIPHVAPTHRCIAPDLIGFGKSDKPDLGYFFDDHVRFMDAFIEALGLEEVVLVIHDWGSALGFHWAKRNPERVKGIAFMEFIRPIPTWDEWPEFARETFQAFRTTDVGRKLIIDQNVFIEGTLPMGVVRPLTEVEMDHYREPFLNPEDREPLWRFPNELPIAGEPANIVALVEEYMDWLHQSPVPKLLFWGTPGVLIPPAEAARLAKSLPNCKAVDIGPGLNLLQEDNPDLIGSEIARWLSTLEISGGSGGSGGGGSGGMVFTLEDFVGDWEQTAAYNLDQVLEQGGVSSLLQNLAVSVTPIQRIVRSGENALKIDIHVIIPYEGLSADQMAQIEEVFKVVYPVDDHHFKVILPYGTLVIDGVTPNMLNYFGRPYEGIAVFDGKKITVTGTLWNGNKIIDERLITPDGSMLFRVTINS

SEQ ID NO: 3140 - protein, 448 aa, Synthetic construct
MFHYVDVGPRDGTPVLFLHGNPTSSYVWRNIIPHVAPTHRCIAPDLIGFGKSDKPDLGYFFDDHVRFMDAFIEALGLEEVVLVIHDWGSALGFHWAKRNPERVKGIAFMEFIRPIPTWDEWPEFARETFQAFRTTDVGRKLIIDQNVFIEGTLPMGVVRPLTEVEMDHYREPFLNPQDREPLWRFPNELPIAGEPANIVALVEEYMDWLHQSPVPKLLFWGTPGVLIPPAEAARLAKSLPNCKAVDIGPGLNLLQEDNPDLIGSEIARWLSTLEISGGSGGSGGGGSGGMVFTLEDFVGDWEQTAAYNLDQVLEQGGVSSLLQNLAVSVTPIQRIVRSGENALKIDIHVIIPYEGLSADQMAQIEEVFKVVYPVDDHHFKVILPYGTLVIDGVTPNMLNYFGRPYEGIAVFDGKKITVTGTLWNGNKIIDERLITPDGSMLFRVTINS

SEQ ID NO: 3141 - protein, 448 aa, Synthetic construct
MFHYVDVGPRDGTPVLFLHGNPTSSYVWRNIIPHVAPTHRCIAPDLIGFGKSDKPDLGYFFDDHVRFMDAFIEALGLEEVVLVIHDWGSALGFHWAKRNPERVKGIAFMEFIRPIPTWDEWPEFARETFQAFRTTDVGRKLIIDQNVFIEGTLPMGVVRPLTEVEMDHYREPFLNPVDREPLWRFANELPIAGEPANIVALVEEYMDWLHQSPVPKLLFWGTPGVLIPPAEAARLAKSLPNCKAVDIGPGLNLLQEDNPDLIGSEIARWLSTLEISGGSGGSGGGGSGGMVFTLEDFVGDWEQTAAYNLDQVLEQGGVSSLLQNLAVSVTPIQRIVRSGENALKIDIHVIIPYEGLSADQMAQIEEVFKVVYPVDDHHFKVILPYGTLVIDGVTPNMLNYFGRPYEGIAVFDGKKITVTGTLWNGNKIIDERLITPDGSMLFRVTINS

SEQ ID NO: 3142 - protein, 448 aa, Synthetic construct
MFHYVDVGPRDGTPVLFLHGNPTSSYVWRNIIPHVAPTHRCIAPDLIGFGKSDKPDLGYFFDDHVRFMDAFIEALGLEEVVLVIHDWGSALGFHWAKRNPERVKGIAFMEFIRPIPTWDEWPEFARETFQAFRTTDVGRKLIIDQNVFIEGTLPMGVVRPLTEVEMDHYREPFLNPVDREPLWRFVNELPIAGEPANIVALVEEYMDWLHQSPVPKLLFWGTPGVLIPPAEAARLAKSLPNCKAVDIGPGLNLLQEDNPDLIGSEIARWLSTLEISGGSGGSGGGGSGGMVFTLEDFVGDWEQTAAYNLDQVLEQGGVSSLLQNLAVSVTPIQRIVRSGENALKIDIHVIIPYEGLSADQMAQIEEVFKVVYPVDDHHFKVILPYGTLVIDGVTPNMLNYFGRPYEGIAVFDGKKITVTGTLWNGNKIIDERLITPDGSMLFRVTINS

SEQ ID NO: 3143 - protein, 448 aa, Synthetic construct
MFHYVDVGPRDGTPVLFLHGNPTSSYVWRNIIPHVAPTHRCIAPDLIGFGKSDKPDLGYFFDDHVRFMDAFIEALGLEEVVLVIHDWGSALGFHWAKRNPERVKGIAFMEFIRPIPTWDEWPEFARETFQAFRTTDVGRKLIIDQNVFIEGTLPMGVVRPLTEVEMDHYREPFLNPVDREPLWRFPNELPIAGEPANIVALVEEYMDWLHQSPVPKLLFWGTPGVLIPPAEAARLAKALPNCKAVDIGPGLNLLQEDNPDLIGSEIARWLSTLEISGGSGGSGGGGSGGMVFTLEDFVGDWEQTAAYNLDQVLEQGGVSSLLQNLAVSVTPIQRIVRSGENALKIDIHVIIPYEGLSADQMAQIEEVFKVVYPVDDHHFKVILPYGTLVIDGVTPNMLNYFGRPYEGIAVFDGKKITVTGTLWNGNKIIDERLITPDGSMLFRVTINS

SEQ ID NO: 3144 - protein, 448 aa, Synthetic construct
MFHYVDVGPRDGTPVLFLHGNPTSSYVWRNIIPHVAPTHRCIAPDLIGFGKSDKPDLGYFFDDHVRFMDAFIEALGLEEVVLVIHDWGSALGFHWAKRNPERVKGIAFMEFIRPIPTWDEWPEFARETFQAFRTTDVGRKLIIDQNVFIEGTLPMGVVRPLTEVEMDHYREPFLNPVDREPLWRFPNELPIAGEPANIVALVEEYMDWLHQSPVPKLLFWGTPGVLIPPAEAARLAKSLPNCKAVDIGPGLNILQEDNPDLIGSEIARWLSTLEISGGSGGSGGGGSGGMVFTLEDFVGDWEQTAAYNLDQVLEQGGVSSLLQNLAVSVTPIQRIVRSGENALKIDIHVIIPYEGLSADQMAQIEEVFKVVYPVDDHHFKVILPYGTLVIDGVTPNMLNYFGRPYEGIAVFDGKKITVTGTLWNGNKIIDERLITPDGSMLFRVTINS

SEQ ID NO: 3145 - protein, 448 aa, Synthetic construct
MFHYVDVGPRDGTPVLFLHGNPTSSYVWRNIIPHVAPTHRCIAPDLIGMGKSSKPPLGYFFDDHVRFMDAFIEALGLEEVVLVIHDWGSALGFHWAKRNPERVKGIAFMEFIRPIPTWDEWPEFARETFQAFRTTDVGRKLIIDQNVFIEGTLPMGVVRPLTEVEMDHYREPFLNPVDREPLWRFPNELPIAGEPANIVALVEEYMDWLHQSPVPKLLFWGTPGVLIPPAEAARLAKSLPNCKAVDIGPGLNLLQEDNPDLIGSEIARWLSTLEISGGSGGSGGGGSGGMVFTLEDFVGDWEQTAAYNLDQVLEQGGVSSLLQNLAVSVTPIQRIVRSGENALKIDIHVIIPYEGLSADQMAQIEEVFKVVYPVDDHHFKVILPYGTLVIDGVTPNMLNYFGRPYEGIAVFDGKKITVTGTLWNGNKIIDERLITPDGSMLFRVTINS

SEQ ID NO: 3146 - protein, 448 aa, Synthetic construct
MFHYVDVGPRDGTPVLFLHGNPTSSYVWRNIIPHVAPTHRCIAPDLIGMGKSSKPDIGYFFDDHVRFMDAFIEALGLEEVVLVIHDWGSALGFHWAKRNPERVKGIAFMEFIRPIPTWDEWPEFARETFQAFRTTDVGRKLIIDQNVFIEGTLPMGVVRPLTEVEMDHYREPFLNPVDREPLWRFPNELPIAGEPANIVALVEEYMDWLHQSPVPKLLFWGTPGVLIPPAEAARLAKSLPNCKAVDIGPGLNLLQEDNPDLIGSEIARWLSTLEISGGSGGSGGGGSGGMVFTLEDFVGDWEQTAAYNLDQVLEQGGVSSLLQNLAVSVTPIQRIVRSGENALKIDIHVIIPYEGLSADQMAQIEEVFKVVYPVDDHHFKVILPYGTLVIDGVTPNMLNYFGRPYEGIAVFDGKKITVTGTLWNGNKIIDERLITPDGSMLFRVTINS

SEQ ID NO: 3147 - protein, 448 aa, Synthetic construct
MFHYVDVGPRDGTPVLFLHGNPTSSYVWRNIIPHVAPTHRCIAPDLIGMGKSSKPDLGYFFDDHVRFMDAFIEALGLEKVVLVIHDWGSALGFHWAKRNPERVKGIAFMEFIRPIPTWDEWPEFARETFQAFRTTDVGRKLIIDQNVFIEGTLPMGVVRPLTEVEMDHYREPFLNPVDREPLWRFPNELPIAGEPANIVALVEEYMDWLHQSPVPKLLFWGTPGVLIPPAEAARLAKSLPNCKAVDIGPGLNLLQEDNPDLIGSEIARWLSTLEISGGSGGSGGGGSGGMVFTLEDFVGDWEQTAAYNLDQVLEQGGVSSLLQNLAVSVTPIQRIVRSGENALKIDIHVIIPYEGLSADQMAQIEEVFKVVYPVDDHHFKVILPYGTLVIDGVTPNMLNYFGRPYEGIAVFDGKKITVTGTLWNGNKIIDERLITPDGSMLFRVTINS

SEQ ID NO: 3148 - protein, 448 aa, Synthetic construct
MFHYVDVGPRDGTPVLFLHGNPTSSYVWRNIIPHVAPTHRCIAPDLIGMGKSSKPDLGYFFDDHVRFMDAFIEALGLEEVVLVIHDWGAALGFHWAKRNPERVKGIAFMEFIRPIPTWDEWPEFARETFQAFRTTDVGRKLIIDQNVFIEGTLPMGVVRPLTEVEMDHYREPFLNPVDREPLWRFPNELPIAGEPANIVALVEEYMDWLHQSPVPKLLFWGTPGVLIPPAEAARLAKSLPNCKAVDIGPGLNLLQEDNPDLIGSEIARWLSTLEISGGSGGSGGGGSGGMVFTLEDFVGDWEQTAAYNLDQVLEQGGVSSLLQNLAVSVTPIQRIVRSGENALKIDIHVIIPYEGLSADQMAQIEEVFKVVYPVDDHHFKVILPYGTLVIDGVTPNMLNYFGRPYEGIAVFDGKKITVTGTLWNGNKIIDERLITPDGSMLFRVTINS

SEQ ID NO: 3149 - protein, 448 aa, Synthetic construct
MFHYVDVGPRDGTPVLFLHGNPTSSYVWRNIIPHVAPTHRCIAPDLIGMGKSSKPDLGYFFDDHVRFMDAFIEALGLEEVVLVIHDWGSALGLHWAKRNPERVKGIAFMEFIRPIPTWDEWPEFARETFQAFRTTDVGRKLIIDQNVFIEGTLPMGVVRPLTEVEMDHYREPFLNPVDREPLWRFPNELPIAGEPANIVALVEEYMDWLHQSPVPKLLFWGTPGVLIPPAEAARLAKSLPNCKAVDIGPGLNLLQEDNPDLIGSEIARWLSTLEISGGSGGSGGGGSGGMVFTLEDFVGDWEQTAAYNLDQVLEQGGVSSLLQNLAVSVTPIQRIVRSGENALKIDIHVIIPYEGLSADQMAQIEEVFKVVYPVDDHHFKVILPYGTLVIDGVTPNMLNYFGRPYEGIAVFDGKKITVTGTLWNGNKIIDERLITPDGSMLFRVTINS

SEQ ID NO: 3150 - protein, 448 aa, Synthetic construct
MFHYVDVGPRDGTPVLFLHGNPTSSYVWRNIIPHVAPTHRCIAPDLIGMGKSSKPDLGYFFDDHVRFMDAFIEALGLEEVVLVIHDWGSALGFHWAKRNPERVKGIAFMEFIRPIPTWDEWPEFAREMFQAFRTTDVGRKLIIDQNVFIEGTLPMGVVRPLTEVEMDHYREPFLNPVDREPLWRFPNELPIAGEPANIVALVEEYMDWLHQSPVPKLLFWGTPGVLIPPAEAARLAKSLPNCKAVDIGPGLNLLQEDNPDLIGSEIARWLSTLEISGGSGGSGGGGSGGMVFTLEDFVGDWEQTAAYNLDQVLEQGGVSSLLQNLAVSVTPIQRIVRSGENALKIDIHVIIPYEGLSADQMAQIEEVFKVVYPVDDHHFKVILPYGTLVIDGVTPNMLNYFGRPYEGIAVFDGKKITVTGTLWNGNKIIDERLITPDGSMLFRVTINS

SEQ ID NO: 3151 - protein, 448 aa, Synthetic construct
MFHYVDVGPRDGTPVLFLHGNPTSSYVWRNIIPHVAPTHRCIAPDLIGMGKSSKPDLGYFFDDHVRFMDAFIEALGLEEVVLVIHDWGSALGFHWAKRNPERVKGIAFMEFIRPIPTWDEWPEFARETFQQFRTTDVGRKLIIDQNVFIEGTLPMGVVRPLTEVEMDHYREPFLNPVDREPLWRFPNELPIAGEPANIVALVEEYMDWLHQSPVPKLLFWGTPGVLIPPAEAARLAKSLPNCKAVDIGPGLNLLQEDNPDLIGSEIARWLSTLEISGGSGGSGGGGSGGMVFTLEDFVGDWEQTAAYNLDQVLEQGGVSSLLQNLAVSVTPIQRIVRSGENALKIDIHVIIPYEGLSADQMAQIEEVFKVVYPVDDHHFKVILPYGTLVIDGVTPNMLNYFGRPYEGIAVFDGKKITVTGTLWNGNKIIDERLITPDGSMLFRVTINS

SEQ ID NO: 3152 - protein, 448 aa, Synthetic construct
MFHYVDVGPRDGTPVLFLHGNPTSSYVWRNIIPHVAPTHRCIAPDLIGMGKSSKPDLGYFFDDHVRFMDAFIEALGLEEVVLVIHDWGSALGFHWAKRNPERVKGIAFMEFIRPIPTWDEWPEFARETFQAFRTEDVGRKLIIDQNVFIEGTLPMGVVRPLTEVEMDHYREPFLNPVDREPLWRFPNELPIAGEPANIVALVEEYMDWLHQSPVPKLLFWGTPGVLIPPAEAARLAKSLPNCKAVDIGPGLNLLQEDNPDLIGSEIARWLSTLEISGGSGGSGGGGSGGMVFTLEDFVGDWEQTAAYNLDQVLEQGGVSSLLQNLAVSVTPIQRIVRSGENALKIDIHVIIPYEGLSADQMAQIEEVFKVVYPVDDHHFKVILPYGTLVIDGVTPNMLNYFGRPYEGIAVFDGKKITVTGTLWNGNKIIDERLITPDGSMLFRVTINS

SEQ ID NO: 3153 - protein, 448 aa, Synthetic construct
MFHYVDVGPRDGTPVLFLHGNPTSSYVWRNIIPHVAPTHRCIAPDLIGMGKSSKPDLGYFFDDHVRFMDAFIEALGLEEVVLVIHDWGSALGFHWAKRNPERVKGIAFMEFIRPIPTWDEWPEFARETFQAFRTTDVGRKLIIDQNVMIEGTLPMGVVRPLTEVEMDHYREPFLNPVDREPLWRFPNELPIAGEPANIVALVEEYMDWLHQSPVPKLLFWGTPGVLIPPAEAARLAKSLPNCKAVDIGPGLNLLQEDNPDLIGSEIARWLSTLEISGGSGGSGGGGSGGMVFTLEDFVGDWEQTAAYNLDQVLEQGGVSSLLQNLAVSVTPIQRIVRSGENALKIDIHVIIPYEGLSADQMAQIEEVFKVVYPVDDHHFKVILPYGTLVIDGVTPNMLNYFGRPYEGIAVFDGKKITVTGTLWNGNKIIDERLITPDGSMLFRVTINS

SEQ ID NO: 3154 - protein, 448 aa, Synthetic construct
MFHYVDVGPRDGTPVLFLHGNPTSSYVWRNIIPHVAPTHRCIAPDLIGMGKSSKPDLGYFFDDHVRFMDAFIEALGLEEVVLVIHDWGSALGFHWAKRNPERVKGIAFMEFIRPIPTWDEWPEFARETFQAFRTTDVGRKLIIDQNVFIEGTLPMGVVRPLTEVEMDHYREPFLNPEDREPLWRFPNELPIAGEPANIVALVEEYMDWLHQSPVPKLLFWGTPGVLIPPAEAARLAKSLPNCKAVDIGPGLNLLQEDNPDLIGSEIARWLSTLEISGGSGGSGGGGSGGMVFTLEDFVGDWEQTAAYNLDQVLEQGGVSSLLQNLAVSVTPIQRIVRSGENALKIDIHVIIPYEGLSADQMAQIEEVFKVVYPVDDHHFKVILPYGTLVIDGVTPNMLNYFGRPYEGIAVFDGKKITVTGTLWNGNKIIDERLITPDGSMLFRVTINS

SEQ ID NO: 3155 - protein, 448 aa, Synthetic construct
MFHYVDVGPRDGTPVLFLHGNPTSSYVWRNIIPHVAPTHRCIAPDLIGMGKSSKPDLGYFFDDHVRFMDAFIEALGLEEVVLVIHDWGSALGFHWAKRNPERVKGIAFMEFIRPIPTWDEWPEFARETFQAFRTTDVGRKLIIDQNVFIEGTLPMGVVRPLTEVEMDHYREPFLNPQDREPLWRFPNELPIAGEPANIVALVEEYMDWLHQSPVPKLLFWGTPGVLIPPAEAARLAKSLPNCKAVDIGPGLNLLQEDNPDLIGSEIARWLSTLEISGGSGGSGGGGSGGMVFTLEDFVGDWEQTAAYNLDQVLEQGGVSSLLQNLAVSVTPIQRIVRSGENALKIDIHVIIPYEGLSADQMAQIEEVFKVVYPVDDHHFKVILPYGTLVIDGVTPNMLNYFGRPYEGIAVFDGKKITVTGTLWNGNKIIDERLITPDGSMLFRVTINS

SEQ ID NO: 3156 - protein, 448 aa, Synthetic construct
MFHYVDVGPRDGTPVLFLHGNPTSSYVWRNIIPHVAPTHRCIAPDLIGMGKSSKPDLGYFFDDHVRFMDAFIEALGLEEVVLVIHDWGSALGFHWAKRNPERVKGIAFMEFIRPIPTWDEWPEFARETFQAFRTTDVGRKLIIDQNVFIEGTLPMGVVRPLTEVEMDHYREPFLNPVDREPLWRFANELPIAGEPANIVALVEEYMDWLHQSPVPKLLFWGTPGVLIPPAEAARLAKSLPNCKAVDIGPGLNLLQEDNPDLIGSEIARWLSTLEISGGSGGSGGGGSGGMVFTLEDFVGDWEQTAAYNLDQVLEQGGVSSLLQNLAVSVTPIQRIVRSGENALKIDIHVIIPYEGLSADQMAQIEEVFKVVYPVDDHHFKVILPYGTLVIDGVTPNMLNYFGRPYEGIAVFDGKKITVTGTLWNGNKIIDERLITPDGSMLFRVTINS

SEQ ID NO: 3157 - protein, 448 aa, Synthetic construct
MFHYVDVGPRDGTPVLFLHGNPTSSYVWRNIIPHVAPTHRCIAPDLIGMGKSSKPDLGYFFDDHVRFMDAFIEALGLEEVVLVIHDWGSALGFHWAKRNPERVKGIAFMEFIRPIPTWDEWPEFARETFQAFRTTDVGRKLIIDQNVFIEGTLPMGVVRPLTEVEMDHYREPFLNPVDREPLWRFVNELPIAGEPANIVALVEEYMDWLHQSPVPKLLFWGTPGVLIPPAEAARLAKSLPNCKAVDIGPGLNLLQEDNPDLIGSEIARWLSTLEISGGSGGSGGGGSGGMVFTLEDFVGDWEQTAAYNLDQVLEQGGVSSLLQNLAVSVTPIQRIVRSGENALKIDIHVIIPYEGLSADQMAQIEEVFKVVYPVDDHHFKVILPYGTLVIDGVTPNMLNYFGRPYEGIAVFDGKKITVTGTLWNGNKIIDERLITPDGSMLFRVTINS

SEQ ID NO: 3158 - protein, 448 aa, Synthetic construct
MFHYVDVGPRDGTPVLFLHGNPTSSYVWRNIIPHVAPTHRCIAPDLIGMGKSSKPDLGYFFDDHVRFMDAFIEALGLEEVVLVIHDWGSALGFHWAKRNPERVKGIAFMEFIRPIPTWDEWPEFARETFQAFRTTDVGRKLIIDQNVFIEGTLPMGVVRPLTEVEMDHYREPFLNPVDREPLWRFPNELPIAGEPANIVALVEEYMDWLHQSPVPKLLFWGTPGVLIPPAEAARLAKALPNCKAVDIGPGLNLLQEDNPDLIGSEIARWLSTLEISGGSGGSGGGGSGGMVFTLEDFVGDWEQTAAYNLDQVLEQGGVSSLLQNLAVSVTPIQRIVRSGENALKIDIHVIIPYEGLSADQMAQIEEVFKVVYPVDDHHFKVILPYGTLVIDGVTPNMLNYFGRPYEGIAVFDGKKITVTGTLWNGNKIIDERLITPDGSMLFRVTINS

SEQ ID NO: 3159 - protein, 448 aa, Synthetic construct
MFHYVDVGPRDGTPVLFLHGNPTSSYVWRNIIPHVAPTHRCIAPDLIGMGKSSKPDLGYFFDDHVRFMDAFIEALGLEEVVLVIHDWGSALGFHWAKRNPERVKGIAFMEFIRPIPTWDEWPEFARETFQAFRTTDVGRKLIIDQNVFIEGTLPMGVVRPLTEVEMDHYREPFLNPVDREPLWRFPNELPIAGEPANIVALVEEYMDWLHQSPVPKLLFWGTPGVLIPPAEAARLAKSLPNCKAVDIGPGLNILQEDNPDLIGSEIARWLSTLEISGGSGGSGGGGSGGMVFTLEDFVGDWEQTAAYNLDQVLEQGGVSSLLQNLAVSVTPIQRIVRSGENALKIDIHVIIPYEGLSADQMAQIEEVFKVVYPVDDHHFKVILPYGTLVIDGVTPNMLNYFGRPYEGIAVFDGKKITVTGTLWNGNKIIDERLITPDGSMLFRVTINS

SEQ ID NO: 3160 - protein, 448 aa, Synthetic construct
MFHYVDVGPRDGTPVLFLHGNPTSSYVWRNIIPHVAPTHRCIAPDLIGMGKSGKPPLGYFFDDHVRFMDAFIEALGLEEVVLVIHDWGSALGFHWAKRNPERVKGIAFMEFIRPIPTWDEWPEFARETFQAFRTTDVGRKLIIDQNVFIEGTLPMGVVRPLTEVEMDHYREPFLNPVDREPLWRFPNELPIAGEPANIVALVEEYMDWLHQSPVPKLLFWGTPGVLIPPAEAARLAKSLPNCKAVDIGPGLNLLQEDNPDLIGSEIARWLSTLEISGGSGGSGGGGSGGMVFTLEDFVGDWEQTAAYNLDQVLEQGGVSSLLQNLAVSVTPIQRIVRSGENALKIDIHVIIPYEGLSADQMAQIEEVFKVVYPVDDHHFKVILPYGTLVIDGVTPNMLNYFGRPYEGIAVFDGKKITVTGTLWNGNKIIDERLITPDGSMLFRVTINS

SEQ ID NO: 3161 - protein, 448 aa, Synthetic construct
MFHYVDVGPRDGTPVLFLHGNPTSSYVWRNIIPHVAPTHRCIAPDLIGMGKSGKPDIGYFFDDHVRFMDAFIEALGLEEVVLVIHDWGSALGFHWAKRNPERVKGIAFMEFIRPIPTWDEWPEFARETFQAFRTTDVGRKLIIDQNVFIEGTLPMGVVRPLTEVEMDHYREPFLNPVDREPLWRFPNELPIAGEPANIVALVEEYMDWLHQSPVPKLLFWGTPGVLIPPAEAARLAKSLPNCKAVDIGPGLNLLQEDNPDLIGSEIARWLSTLEISGGSGGSGGGGSGGMVFTLEDFVGDWEQTAAYNLDQVLEQGGVSSLLQNLAVSVTPIQRIVRSGENALKIDIHVIIPYEGLSADQMAQIEEVFKVVYPVDDHHFKVILPYGTLVIDGVTPNMLNYFGRPYEGIAVFDGKKITVTGTLWNGNKIIDERLITPDGSMLFRVTINS

SEQ ID NO: 3162 - protein, 448 aa, Synthetic construct
MFHYVDVGPRDGTPVLFLHGNPTSSYVWRNIIPHVAPTHRCIAPDLIGMGKSGKPDLGYFFDDHVRFMDAFIEALGLEKVVLVIHDWGSALGFHWAKRNPERVKGIAFMEFIRPIPTWDEWPEFARETFQAFRTTDVGRKLIIDQNVFIEGTLPMGVVRPLTEVEMDHYREPFLNPVDREPLWRFPNELPIAGEPANIVALVEEYMDWLHQSPVPKLLFWGTPGVLIPPAEAARLAKSLPNCKAVDIGPGLNLLQEDNPDLIGSEIARWLSTLEISGGSGGSGGGGSGGMVFTLEDFVGDWEQTAAYNLDQVLEQGGVSSLLQNLAVSVTPIQRIVRSGENALKIDIHVIIPYEGLSADQMAQIEEVFKVVYPVDDHHFKVILPYGTLVIDGVTPNMLNYFGRPYEGIAVFDGKKITVTGTLWNGNKIIDERLITPDGSMLFRVTINS

SEQ ID NO: 3163 - protein, 448 aa, Synthetic construct
MFHYVDVGPRDGTPVLFLHGNPTSSYVWRNIIPHVAPTHRCIAPDLIGMGKSGKPDLGYFFDDHVRFMDAFIEALGLEEVVLVIHDWGAALGFHWAKRNPERVKGIAFMEFIRPIPTWDEWPEFARETFQAFRTTDVGRKLIIDQNVFIEGTLPMGVVRPLTEVEMDHYREPFLNPVDREPLWRFPNELPIAGEPANIVALVEEYMDWLHQSPVPKLLFWGTPGVLIPPAEAARLAKSLPNCKAVDIGPGLNLLQEDNPDLIGSEIARWLSTLEISGGSGGSGGGGSGGMVFTLEDFVGDWEQTAAYNLDQVLEQGGVSSLLQNLAVSVTPIQRIVRSGENALKIDIHVIIPYEGLSADQMAQIEEVFKVVYPVDDHHFKVILPYGTLVIDGVTPNMLNYFGRPYEGIAVFDGKKITVTGTLWNGNKIIDERLITPDGSMLFRVTINS

SEQ ID NO: 3164 - protein, 448 aa, Synthetic construct
MFHYVDVGPRDGTPVLFLHGNPTSSYVWRNIIPHVAPTHRCIAPDLIGMGKSGKPDLGYFFDDHVRFMDAFIEALGLEEVVLVIHDWGSALGFHWAKRNPERVKGIAFMEFIRPIPTWDEWPEFAREMFQAFRTTDVGRKLIIDQNVFIEGTLPMGVVRPLTEVEMDHYREPFLNPVDREPLWRFPNELPIAGEPANIVALVEEYMDWLHQSPVPKLLFWGTPGVLIPPAEAARLAKSLPNCKAVDIGPGLNLLQEDNPDLIGSEIARWLSTLEISGGSGGSGGGGSGGMVFTLEDFVGDWEQTAAYNLDQVLEQGGVSSLLQNLAVSVTPIQRIVRSGENALKIDIHVIIPYEGLSADQMAQIEEVFKVVYPVDDHHFKVILPYGTLVIDGVTPNMLNYFGRPYEGIAVFDGKKITVTGTLWNGNKIIDERLITPDGSMLFRVTINS

SEQ ID NO: 3165 - protein, 448 aa, Synthetic construct
MFHYVDVGPRDGTPVLFLHGNPTSSYVWRNIIPHVAPTHRCIAPDLIGMGKSGKPDLGYFFDDHVRFMDAFIEALGLEEVVLVIHDWGSALGFHWAKRNPERVKGIAFMEFIRPIPTWDEWPEFARETFQQFRTTDVGRKLIIDQNVFIEGTLPMGVVRPLTEVEMDHYREPFLNPVDREPLWRFPNELPIAGEPANIVALVEEYMDWLHQSPVPKLLFWGTPGVLIPPAEAARLAKSLPNCKAVDIGPGLNLLQEDNPDLIGSEIARWLSTLEISGGSGGSGGGGSGGMVFTLEDFVGDWEQTAAYNLDQVLEQGGVSSLLQNLAVSVTPIQRIVRSGENALKIDIHVIIPYEGLSADQMAQIEEVFKVVYPVDDHHFKVILPYGTLVIDGVTPNMLNYFGRPYEGIAVFDGKKITVTGTLWNGNKIIDERLITPDGSMLFRVTINS

SEQ ID NO: 3166 - protein, 448 aa, Synthetic construct
MFHYVDVGPRDGTPVLFLHGNPTSSYVWRNIIPHVAPTHRCIAPDLIGMGKSGKPDLGYFFDDHVRFMDAFIEALGLEEVVLVIHDWGSALGFHWAKRNPERVKGIAFMEFIRPIPTWDEWPEFARETFQAFRTEDVGRKLIIDQNVFIEGTLPMGVVRPLTEVEMDHYREPFLNPVDREPLWRFPNELPIAGEPANIVALVEEYMDWLHQSPVPKLLFWGTPGVLIPPAEAARLAKSLPNCKAVDIGPGLNLLQEDNPDLIGSEIARWLSTLEISGGSGGSGGGGSGGMVFTLEDFVGDWEQTAAYNLDQVLEQGGVSSLLQNLAVSVTPIQRIVRSGENALKIDIHVIIPYEGLSADQMAQIEEVFKVVYPVDDHHFKVILPYGTLVIDGVTPNMLNYFGRPYEGIAVFDGKKITVTGTLWNGNKIIDERLITPDGSMLFRVTINS

SEQ ID NO: 3167 - protein, 448 aa, Synthetic construct
MFHYVDVGPRDGTPVLFLHGNPTSSYVWRNIIPHVAPTHRCIAPDLIGMGKSGKPDLGYFFDDHVRFMDAFIEALGLEEVVLVIHDWGSALGFHWAKRNPERVKGIAFMEFIRPIPTWDEWPEFARETFQAFRTTDVGRKLIIDQNVMIEGTLPMGVVRPLTEVEMDHYREPFLNPVDREPLWRFPNELPIAGEPANIVALVEEYMDWLHQSPVPKLLFWGTPGVLIPPAEAARLAKSLPNCKAVDIGPGLNLLQEDNPDLIGSEIARWLSTLEISGGSGGSGGGGSGGMVFTLEDFVGDWEQTAAYNLDQVLEQGGVSSLLQNLAVSVTPIQRIVRSGENALKIDIHVIIPYEGLSADQMAQIEEVFKVVYPVDDHHFKVILPYGTLVIDGVTPNMLNYFGRPYEGIAVFDGKKITVTGTLWNGNKIIDERLITPDGSMLFRVTINS

SEQ ID NO: 3168 - protein, 448 aa, Synthetic construct
MFHYVDVGPRDGTPVLFLHGNPTSSYVWRNIIPHVAPTHRCIAPDLIGMGKSGKPDLGYFFDDHVRFMDAFIEALGLEEVVLVIHDWGSALGFHWAKRNPERVKGIAFMEFIRPIPTWDEWPEFARETFQAFRTTDVGRKLIIDQNVFIEGTLPMGVVRPLTEVEMDHYREPFLNPEDREPLWRFPNELPIAGEPANIVALVEEYMDWLHQSPVPKLLFWGTPGVLIPPAEAARLAKSLPNCKAVDIGPGLNLLQEDNPDLIGSEIARWLSTLEISGGSGGSGGGGSGGMVFTLEDFVGDWEQTAAYNLDQVLEQGGVSSLLQNLAVSVTPIQRIVRSGENALKIDIHVIIPYEGLSADQMAQIEEVFKVVYPVDDHHFKVILPYGTLVIDGVTPNMLNYFGRPYEGIAVFDGKKITVTGTLWNGNKIIDERLITPDGSMLFRVTINS

SEQ ID NO: 3169 - protein, 448 aa, Synthetic construct
MFHYVDVGPRDGTPVLFLHGNPTSSYVWRNIIPHVAPTHRCIAPDLIGMGKSGKPDLGYFFDDHVRFMDAFIEALGLEEVVLVIHDWGSALGFHWAKRNPERVKGIAFMEFIRPIPTWDEWPEFARETFQAFRTTDVGRKLIIDQNVFIEGTLPMGVVRPLTEVEMDHYREPFLNPQDREPLWRFPNELPIAGEPANIVALVEEYMDWLHQSPVPKLLFWGTPGVLIPPAEAARLAKSLPNCKAVDIGPGLNLLQEDNPDLIGSEIARWLSTLEISGGSGGSGGGGSGGMVFTLEDFVGDWEQTAAYNLDQVLEQGGVSSLLQNLAVSVTPIQRIVRSGENALKIDIHVIIPYEGLSADQMAQIEEVFKVVYPVDDHHFKVILPYGTLVIDGVTPNMLNYFGRPYEGIAVFDGKKITVTGTLWNGNKIIDERLITPDGSMLFRVTINS

SEQ ID NO: 3170 - protein, 448 aa, Synthetic construct
MFHYVDVGPRDGTPVLFLHGNPTSSYVWRNIIPHVAPTHRCIAPDLIGMGKSGKPDLGYFFDDHVRFMDAFIEALGLEEVVLVIHDWGSALGFHWAKRNPERVKGIAFMEFIRPIPTWDEWPEFARETFQAFRTTDVGRKLIIDQNVFIEGTLPMGVVRPLTEVEMDHYREPFLNPVDREPLWRFANELPIAGEPANIVALVEEYMDWLHQSPVPKLLFWGTPGVLIPPAEAARLAKSLPNCKAVDIGPGLNLLQEDNPDLIGSEIARWLSTLEISGGSGGSGGGGSGGMVFTLEDFVGDWEQTAAYNLDQVLEQGGVSSLLQNLAVSVTPIQRIVRSGENALKIDIHVIIPYEGLSADQMAQIEEVFKVVYPVDDHHFKVILPYGTLVIDGVTPNMLNYFGRPYEGIAVFDGKKITVTGTLWNGNKIIDERLITPDGSMLFRVTINS

SEQ ID NO: 3171 - protein, 448 aa, Synthetic construct
MFHYVDVGPRDGTPVLFLHGNPTSSYVWRNIIPHVAPTHRCIAPDLIGMGKSGKPDLGYFFDDHVRFMDAFIEALGLEEVVLVIHDWGSALGFHWAKRNPERVKGIAFMEFIRPIPTWDEWPEFARETFQAFRTTDVGRKLIIDQNVFIEGTLPMGVVRPLTEVEMDHYREPFLNPVDREPLWRFVNELPIAGEPANIVALVEEYMDWLHQSPVPKLLFWGTPGVLIPPAEAARLAKSLPNCKAVDIGPGLNLLQEDNPDLIGSEIARWLSTLEISGGSGGSGGGGSGGMVFTLEDFVGDWEQTAAYNLDQVLEQGGVSSLLQNLAVSVTPIQRIVRSGENALKIDIHVIIPYEGLSADQMAQIEEVFKVVYPVDDHHFKVILPYGTLVIDGVTPNMLNYFGRPYEGIAVFDGKKITVTGTLWNGNKIIDERLITPDGSMLFRVTINS

SEQ ID NO: 3172 - protein, 448 aa, Synthetic construct
MFHYVDVGPRDGTPVLFLHGNPTSSYVWRNIIPHVAPTHRCIAPDLIGMGKSGKPDLGYFFDDHVRFMDAFIEALGLEEVVLVIHDWGSALGFHWAKRNPERVKGIAFMEFIRPIPTWDEWPEFARETFQAFRTTDVGRKLIIDQNVFIEGTLPMGVVRPLTEVEMDHYREPFLNPVDREPLWRFPNELPIAGEPANIVALVEEYMDWLHQSPVPKLLFWGTPGVLIPPAEAARLAKALPNCKAVDIGPGLNLLQEDNPDLIGSEIARWLSTLEISGGSGGSGGGGSGGMVFTLEDFVGDWEQTAAYNLDQVLEQGGVSSLLQNLAVSVTPIQRIVRSGENALKIDIHVIIPYEGLSADQMAQIEEVFKVVYPVDDHHFKVILPYGTLVIDGVTPNMLNYFGRPYEGIAVFDGKKITVTGTLWNGNKIIDERLITPDGSMLFRVTINS

SEQ ID NO: 3173 - protein, 448 aa, Synthetic construct
MFHYVDVGPRDGTPVLFLHGNPTSSYVWRNIIPHVAPTHRCIAPDLIGMGKSGKPDLGYFFDDHVRFMDAFIEALGLEEVVLVIHDWGSALGFHWAKRNPERVKGIAFMEFIRPIPTWDEWPEFARETFQAFRTTDVGRKLIIDQNVFIEGTLPMGVVRPLTEVEMDHYREPFLNPVDREPLWRFPNELPIAGEPANIVALVEEYMDWLHQSPVPKLLFWGTPGVLIPPAEAARLAKSLPNCKAVDIGPGLNILQEDNPDLIGSEIARWLSTLEISGGSGGSGGGGSGGMVFTLEDFVGDWEQTAAYNLDQVLEQGGVSSLLQNLAVSVTPIQRIVRSGENALKIDIHVIIPYEGLSADQMAQIEEVFKVVYPVDDHHFKVILPYGTLVIDGVTPNMLNYFGRPYEGIAVFDGKKITVTGTLWNGNKIIDERLITPDGSMLFRVTINS

SEQ ID NO: 3174 - protein, 448 aa, Synthetic construct
MFHYVDVGPRDGTPVLFLHGNPTSSYVWRNIIPHVAPTHRCIAPDLIGMGKSDKPPIGYFFDDHVRFMDAFIEALGLEEVVLVIHDWGSALGFHWAKRNPERVKGIAFMEFIRPIPTWDEWPEFARETFQAFRTTDVGRKLIIDQNVFIEGTLPMGVVRPLTEVEMDHYREPFLNPVDREPLWRFPNELPIAGEPANIVALVEEYMDWLHQSPVPKLLFWGTPGVLIPPAEAARLAKSLPNCKAVDIGPGLNLLQEDNPDLIGSEIARWLSTLEISGGSGGSGGGGSGGMVFTLEDFVGDWEQTAAYNLDQVLEQGGVSSLLQNLAVSVTPIQRIVRSGENALKIDIHVIIPYEGLSADQMAQIEEVFKVVYPVDDHHFKVILPYGTLVIDGVTPNMLNYFGRPYEGIAVFDGKKITVTGTLWNGNKIIDERLITPDGSMLFRVTINS

SEQ ID NO: 3175 - protein, 448 aa, Synthetic construct
MFHYVDVGPRDGTPVLFLHGNPTSSYVWRNIIPHVAPTHRCIAPDLIGMGKSDKPPLGYFFDDHVRFMDAFIEALGLEKVVLVIHDWGSALGFHWAKRNPERVKGIAFMEFIRPIPTWDEWPEFARETFQAFRTTDVGRKLIIDQNVFIEGTLPMGVVRPLTEVEMDHYREPFLNPVDREPLWRFPNELPIAGEPANIVALVEEYMDWLHQSPVPKLLFWGTPGVLIPPAEAARLAKSLPNCKAVDIGPGLNLLQEDNPDLIGSEIARWLSTLEISGGSGGSGGGGSGGMVFTLEDFVGDWEQTAAYNLDQVLEQGGVSSLLQNLAVSVTPIQRIVRSGENALKIDIHVIIPYEGLSADQMAQIEEVFKVVYPVDDHHFKVILPYGTLVIDGVTPNMLNYFGRPYEGIAVFDGKKITVTGTLWNGNKIIDERLITPDGSMLFRVTINS

SEQ ID NO: 3176 - protein, 448 aa, Synthetic construct
MFHYVDVGPRDGTPVLFLHGNPTSSYVWRNIIPHVAPTHRCIAPDLIGMGKSDKPPLGYFFDDHVRFMDAFIEALGLEEVVLVIHDWGAALGFHWAKRNPERVKGIAFMEFIRPIPTWDEWPEFARETFQAFRTTDVGRKLIIDQNVFIEGTLPMGVVRPLTEVEMDHYREPFLNPVDREPLWRFPNELPIAGEPANIVALVEEYMDWLHQSPVPKLLFWGTPGVLIPPAEAARLAKSLPNCKAVDIGPGLNLLQEDNPDLIGSEIARWLSTLEISGGSGGSGGGGSGGMVFTLEDFVGDWEQTAAYNLDQVLEQGGVSSLLQNLAVSVTPIQRIVRSGENALKIDIHVIIPYEGLSADQMAQIEEVFKVVYPVDDHHFKVILPYGTLVIDGVTPNMLNYFGRPYEGIAVFDGKKITVTGTLWNGNKIIDERLITPDGSMLFRVTINS

SEQ ID NO: 3177 - protein, 448 aa, Synthetic construct
MFHYVDVGPRDGTPVLFLHGNPTSSYVWRNIIPHVAPTHRCIAPDLIGMGKSDKPPLGYFFDDHVRFMDAFIEALGLEEVVLVIHDWGSALGLHWAKRNPERVKGIAFMEFIRPIPTWDEWPEFARETFQAFRTTDVGRKLIIDQNVFIEGTLPMGVVRPLTEVEMDHYREPFLNPVDREPLWRFPNELPIAGEPANIVALVEEYMDWLHQSPVPKLLFWGTPGVLIPPAEAARLAKSLPNCKAVDIGPGLNLLQEDNPDLIGSEIARWLSTLEISGGSGGSGGGGSGGMVFTLEDFVGDWEQTAAYNLDQVLEQGGVSSLLQNLAVSVTPIQRIVRSGENALKIDIHVIIPYEGLSADQMAQIEEVFKVVYPVDDHHFKVILPYGTLVIDGVTPNMLNYFGRPYEGIAVFDGKKITVTGTLWNGNKIIDERLITPDGSMLFRVTINS

SEQ ID NO: 3178 - protein, 448 aa, Synthetic construct
MFHYVDVGPRDGTPVLFLHGNPTSSYVWRNIIPHVAPTHRCIAPDLIGMGKSDKPPLGYFFDDHVRFMDAFIEALGLEEVVLVIHDWGSALGFHWAKRNPERVKGIAFMEFIRPIPTWDEWPEFAREMFQAFRTTDVGRKLIIDQNVFIEGTLPMGVVRPLTEVEMDHYREPFLNPVDREPLWRFPNELPIAGEPANIVALVEEYMDWLHQSPVPKLLFWGTPGVLIPPAEAARLAKSLPNCKAVDIGPGLNLLQEDNPDLIGSEIARWLSTLEISGGSGGSGGGGSGGMVFTLEDFVGDWEQTAAYNLDQVLEQGGVSSLLQNLAVSVTPIQRIVRSGENALKIDIHVIIPYEGLSADQMAQIEEVFKVVYPVDDHHFKVILPYGTLVIDGVTPNMLNYFGRPYEGIAVFDGKKITVTGTLWNGNKIIDERLITPDGSMLFRVTINS

SEQ ID NO: 3179 - protein, 448 aa, Synthetic construct
MFHYVDVGPRDGTPVLFLHGNPTSSYVWRNIIPHVAPTHRCIAPDLIGMGKSDKPPLGYFFDDHVRFMDAFIEALGLEEVVLVIHDWGSALGFHWAKRNPERVKGIAFMEFIRPIPTWDEWPEFARETFQQFRTTDVGRKLIIDQNVFIEGTLPMGVVRPLTEVEMDHYREPFLNPVDREPLWRFPNELPIAGEPANIVALVEEYMDWLHQSPVPKLLFWGTPGVLIPPAEAARLAKSLPNCKAVDIGPGLNLLQEDNPDLIGSEIARWLSTLEISGGSGGSGGGGSGGMVFTLEDFVGDWEQTAAYNLDQVLEQGGVSSLLQNLAVSVTPIQRIVRSGENALKIDIHVIIPYEGLSADQMAQIEEVFKVVYPVDDHHFKVILPYGTLVIDGVTPNMLNYFGRPYEGIAVFDGKKITVTGTLWNGNKIIDERLITPDGSMLFRVTINS

SEQ ID NO: 3180 - protein, 448 aa, Synthetic construct
MFHYVDVGPRDGTPVLFLHGNPTSSYVWRNIIPHVAPTHRCIAPDLIGMGKSDKPPLGYFFDDHVRFMDAFIEALGLEEVVLVIHDWGSALGFHWAKRNPERVKGIAFMEFIRPIPTWDEWPEFARETFQAFRTEDVGRKLIIDQNVFIEGTLPMGVVRPLTEVEMDHYREPFLNPVDREPLWRFPNELPIAGEPANIVALVEEYMDWLHQSPVPKLLFWGTPGVLIPPAEAARLAKSLPNCKAVDIGPGLNLLQEDNPDLIGSEIARWLSTLEISGGSGGSGGGGSGGMVFTLEDFVGDWEQTAAYNLDQVLEQGGVSSLLQNLAVSVTPIQRIVRSGENALKIDIHVIIPYEGLSADQMAQIEEVFKVVYPVDDHHFKVILPYGTLVIDGVTPNMLNYFGRPYEGIAVFDGKKITVTGTLWNGNKIIDERLITPDGSMLFRVTINS

SEQ ID NO: 3181 - protein, 448 aa, Synthetic construct
MFHYVDVGPRDGTPVLFLHGNPTSSYVWRNIIPHVAPTHRCIAPDLIGMGKSDKPPLGYFFDDHVRFMDAFIEALGLEEVVLVIHDWGSALGFHWAKRNPERVKGIAFMEFIRPIPTWDEWPEFARETFQAFRTTDVGRKLIIDQNVMIEGTLPMGVVRPLTEVEMDHYREPFLNPVDREPLWRFPNELPIAGEPANIVALVEEYMDWLHQSPVPKLLFWGTPGVLIPPAEAARLAKSLPNCKAVDIGPGLNLLQEDNPDLIGSEIARWLSTLEISGGSGGSGGGGSGGMVFTLEDFVGDWEQTAAYNLDQVLEQGGVSSLLQNLAVSVTPIQRIVRSGENALKIDIHVIIPYEGLSADQMAQIEEVFKVVYPVDDHHFKVILPYGTLVIDGVTPNMLNYFGRPYEGIAVFDGKKITVTGTLWNGNKIIDERLITPDGSMLFRVTINS

SEQ ID NO: 3182 - protein, 448 aa, Synthetic construct
MFHYVDVGPRDGTPVLFLHGNPTSSYVWRNIIPHVAPTHRCIAPDLIGMGKSDKPPLGYFFDDHVRFMDAFIEALGLEEVVLVIHDWGSALGFHWAKRNPERVKGIAFMEFIRPIPTWDEWPEFARETFQAFRTTDVGRKLIIDQNVFIEGTLPMGVVRPLTEVEMDHYREPFLNPEDREPLWRFPNELPIAGEPANIVALVEEYMDWLHQSPVPKLLFWGTPGVLIPPAEAARLAKSLPNCKAVDIGPGLNLLQEDNPDLIGSEIARWLSTLEISGGSGGSGGGGSGGMVFTLEDFVGDWEQTAAYNLDQVLEQGGVSSLLQNLAVSVTPIQRIVRSGENALKIDIHVIIPYEGLSADQMAQIEEVFKVVYPVDDHHFKVILPYGTLVIDGVTPNMLNYFGRPYEGIAVFDGKKITVTGTLWNGNKIIDERLITPDGSMLFRVTINS

SEQ ID NO: 3183 - protein, 448 aa, Synthetic construct
MFHYVDVGPRDGTPVLFLHGNPTSSYVWRNIIPHVAPTHRCIAPDLIGMGKSDKPPLGYFFDDHVRFMDAFIEALGLEEVVLVIHDWGSALGFHWAKRNPERVKGIAFMEFIRPIPTWDEWPEFARETFQAFRTTDVGRKLIIDQNVFIEGTLPMGVVRPLTEVEMDHYREPFLNPQDREPLWRFPNELPIAGEPANIVALVEEYMDWLHQSPVPKLLFWGTPGVLIPPAEAARLAKSLPNCKAVDIGPGLNLLQEDNPDLIGSEIARWLSTLEISGGSGGSGGGGSGGMVFTLEDFVGDWEQTAAYNLDQVLEQGGVSSLLQNLAVSVTPIQRIVRSGENALKIDIHVIIPYEGLSADQMAQIEEVFKVVYPVDDHHFKVILPYGTLVIDGVTPNMLNYFGRPYEGIAVFDGKKITVTGTLWNGNKIIDERLITPDGSMLFRVTINS

SEQ ID NO: 3184 - protein, 448 aa, Synthetic construct
MFHYVDVGPRDGTPVLFLHGNPTSSYVWRNIIPHVAPTHRCIAPDLIGMGKSDKPPLGYFFDDHVRFMDAFIEALGLEEVVLVIHDWGSALGFHWAKRNPERVKGIAFMEFIRPIPTWDEWPEFARETFQAFRTTDVGRKLIIDQNVFIEGTLPMGVVRPLTEVEMDHYREPFLNPVDREPLWRFANELPIAGEPANIVALVEEYMDWLHQSPVPKLLFWGTPGVLIPPAEAARLAKSLPNCKAVDIGPGLNLLQEDNPDLIGSEIARWLSTLEISGGSGGSGGGGSGGMVFTLEDFVGDWEQTAAYNLDQVLEQGGVSSLLQNLAVSVTPIQRIVRSGENALKIDIHVIIPYEGLSADQMAQIEEVFKVVYPVDDHHFKVILPYGTLVIDGVTPNMLNYFGRPYEGIAVFDGKKITVTGTLWNGNKIIDERLITPDGSMLFRVTINS

SEQ ID NO: 3185 - protein, 448 aa, Synthetic construct
MFHYVDVGPRDGTPVLFLHGNPTSSYVWRNIIPHVAPTHRCIAPDLIGMGKSDKPPLGYFFDDHVRFMDAFIEALGLEEVVLVIHDWGSALGFHWAKRNPERVKGIAFMEFIRPIPTWDEWPEFARETFQAFRTTDVGRKLIIDQNVFIEGTLPMGVVRPLTEVEMDHYREPFLNPVDREPLWRFVNELPIAGEPANIVALVEEYMDWLHQSPVPKLLFWGTPGVLIPPAEAARLAKSLPNCKAVDIGPGLNLLQEDNPDLIGSEIARWLSTLEISGGSGGSGGGGSGGMVFTLEDFVGDWEQTAAYNLDQVLEQGGVSSLLQNLAVSVTPIQRIVRSGENALKIDIHVIIPYEGLSADQMAQIEEVFKVVYPVDDHHFKVILPYGTLVIDGVTPNMLNYFGRPYEGIAVFDGKKITVTGTLWNGNKIIDERLITPDGSMLFRVTINS

SEQ ID NO: 3186 - protein, 448 aa, Synthetic construct
MFHYVDVGPRDGTPVLFLHGNPTSSYVWRNIIPHVAPTHRCIAPDLIGMGKSDKPPLGYFFDDHVRFMDAFIEALGLEEVVLVIHDWGSALGFHWAKRNPERVKGIAFMEFIRPIPTWDEWPEFARETFQAFRTTDVGRKLIIDQNVFIEGTLPMGVVRPLTEVEMDHYREPFLNPVDREPLWRFPNELPIAGEPANIVALVEEYMDWLHQSPVPKLLFWGTPGVLIPPAEAARLAKALPNCKAVDIGPGLNLLQEDNPDLIGSEIARWLSTLEISGGSGGSGGGGSGGMVFTLEDFVGDWEQTAAYNLDQVLEQGGVSSLLQNLAVSVTPIQRIVRSGENALKIDIHVIIPYEGLSADQMAQIEEVFKVVYPVDDHHFKVILPYGTLVIDGVTPNMLNYFGRPYEGIAVFDGKKITVTGTLWNGNKIIDERLITPDGSMLFRVTINS

SEQ ID NO: 3187 - protein, 448 aa, Synthetic construct
MFHYVDVGPRDGTPVLFLHGNPTSSYVWRNIIPHVAPTHRCIAPDLIGMGKSDKPPLGYFFDDHVRFMDAFIEALGLEEVVLVIHDWGSALGFHWAKRNPERVKGIAFMEFIRPIPTWDEWPEFARETFQAFRTTDVGRKLIIDQNVFIEGTLPMGVVRPLTEVEMDHYREPFLNPVDREPLWRFPNELPIAGEPANIVALVEEYMDWLHQSPVPKLLFWGTPGVLIPPAEAARLAKSLPNCKAVDIGPGLNILQEDNPDLIGSEIARWLSTLEISGGSGGSGGGGSGGMVFTLEDFVGDWEQTAAYNLDQVLEQGGVSSLLQNLAVSVTPIQRIVRSGENALKIDIHVIIPYEGLSADQMAQIEEVFKVVYPVDDHHFKVILPYGTLVIDGVTPNMLNYFGRPYEGIAVFDGKKITVTGTLWNGNKIIDERLITPDGSMLFRVTINS

SEQ ID NO: 3188 - protein, 448 aa, Synthetic construct
MFHYVDVGPRDGTPVLFLHGNPTSSYVWRNIIPHVAPTHRCIAPDLIGMGKSDKPDIGYFFDDHVRFMDAFIEALGLEKVVLVIHDWGSALGFHWAKRNPERVKGIAFMEFIRPIPTWDEWPEFARETFQAFRTTDVGRKLIIDQNVFIEGTLPMGVVRPLTEVEMDHYREPFLNPVDREPLWRFPNELPIAGEPANIVALVEEYMDWLHQSPVPKLLFWGTPGVLIPPAEAARLAKSLPNCKAVDIGPGLNLLQEDNPDLIGSEIARWLSTLEISGGSGGSGGGGSGGMVFTLEDFVGDWEQTAAYNLDQVLEQGGVSSLLQNLAVSVTPIQRIVRSGENALKIDIHVIIPYEGLSADQMAQIEEVFKVVYPVDDHHFKVILPYGTLVIDGVTPNMLNYFGRPYEGIAVFDGKKITVTGTLWNGNKIIDERLITPDGSMLFRVTINS

SEQ ID NO: 3189 - protein, 448 aa, Synthetic construct
MFHYVDVGPRDGTPVLFLHGNPTSSYVWRNIIPHVAPTHRCIAPDLIGMGKSDKPDIGYFFDDHVRFMDAFIEALGLEEVVLVIHDWGAALGFHWAKRNPERVKGIAFMEFIRPIPTWDEWPEFARETFQAFRTTDVGRKLIIDQNVFIEGTLPMGVVRPLTEVEMDHYREPFLNPVDREPLWRFPNELPIAGEPANIVALVEEYMDWLHQSPVPKLLFWGTPGVLIPPAEAARLAKSLPNCKAVDIGPGLNLLQEDNPDLIGSEIARWLSTLEISGGSGGSGGGGSGGMVFTLEDFVGDWEQTAAYNLDQVLEQGGVSSLLQNLAVSVTPIQRIVRSGENALKIDIHVIIPYEGLSADQMAQIEEVFKVVYPVDDHHFKVILPYGTLVIDGVTPNMLNYFGRPYEGIAVFDGKKITVTGTLWNGNKIIDERLITPDGSMLFRVTINS

SEQ ID NO: 3190 - protein, 448 aa, Synthetic construct
MFHYVDVGPRDGTPVLFLHGNPTSSYVWRNIIPHVAPTHRCIAPDLIGMGKSDKPDIGYFFDDHVRFMDAFIEALGLEEVVLVIHDWGSALGLHWAKRNPERVKGIAFMEFIRPIPTWDEWPEFARETFQAFRTTDVGRKLIIDQNVFIEGTLPMGVVRPLTEVEMDHYREPFLNPVDREPLWRFPNELPIAGEPANIVALVEEYMDWLHQSPVPKLLFWGTPGVLIPPAEAARLAKSLPNCKAVDIGPGLNLLQEDNPDLIGSEIARWLSTLEISGGSGGSGGGGSGGMVFTLEDFVGDWEQTAAYNLDQVLEQGGVSSLLQNLAVSVTPIQRIVRSGENALKIDIHVIIPYEGLSADQMAQIEEVFKVVYPVDDHHFKVILPYGTLVIDGVTPNMLNYFGRPYEGIAVFDGKKITVTGTLWNGNKIIDERLITPDGSMLFRVTINS

SEQ ID NO: 3191 - protein, 448 aa, Synthetic construct
MFHYVDVGPRDGTPVLFLHGNPTSSYVWRNIIPHVAPTHRCIAPDLIGMGKSDKPDIGYFFDDHVRFMDAFIEALGLEEVVLVIHDWGSALGFHWAKRNPERVKGIAFMEFIRPIPTWDEWPEFAREMFQAFRTTDVGRKLIIDQNVFIEGTLPMGVVRPLTEVEMDHYREPFLNPVDREPLWRFPNELPIAGEPANIVALVEEYMDWLHQSPVPKLLFWGTPGVLIPPAEAARLAKSLPNCKAVDIGPGLNLLQEDNPDLIGSEIARWLSTLEISGGSGGSGGGGSGGMVFTLEDFVGDWEQTAAYNLDQVLEQGGVSSLLQNLAVSVTPIQRIVRSGENALKIDIHVIIPYEGLSADQMAQIEEVFKVVYPVDDHHFKVILPYGTLVIDGVTPNMLNYFGRPYEGIAVFDGKKITVTGTLWNGNKIIDERLITPDGSMLFRVTINS

SEQ ID NO: 3192 - protein, 448 aa, Synthetic construct
MFHYVDVGPRDGTPVLFLHGNPTSSYVWRNIIPHVAPTHRCIAPDLIGMGKSDKPDIGYFFDDHVRFMDAFIEALGLEEVVLVIHDWGSALGFHWAKRNPERVKGIAFMEFIRPIPTWDEWPEFARETFQQFRTTDVGRKLIIDQNVFIEGTLPMGVVRPLTEVEMDHYREPFLNPVDREPLWRFPNELPIAGEPANIVALVEEYMDWLHQSPVPKLLFWGTPGVLIPPAEAARLAKSLPNCKAVDIGPGLNLLQEDNPDLIGSEIARWLSTLEISGGSGGSGGGGSGGMVFTLEDFVGDWEQTAAYNLDQVLEQGGVSSLLQNLAVSVTPIQRIVRSGENALKIDIHVIIPYEGLSADQMAQIEEVFKVVYPVDDHHFKVILPYGTLVIDGVTPNMLNYFGRPYEGIAVFDGKKITVTGTLWNGNKIIDERLITPDGSMLFRVTINS

SEQ ID NO: 3193 - protein, 448 aa, Synthetic construct
MFHYVDVGPRDGTPVLFLHGNPTSSYVWRNIIPHVAPTHRCIAPDLIGMGKSDKPDIGYFFDDHVRFMDAFIEALGLEEVVLVIHDWGSALGFHWAKRNPERVKGIAFMEFIRPIPTWDEWPEFARETFQAFRTEDVGRKLIIDQNVFIEGTLPMGVVRPLTEVEMDHYREPFLNPVDREPLWRFPNELPIAGEPANIVALVEEYMDWLHQSPVPKLLFWGTPGVLIPPAEAARLAKSLPNCKAVDIGPGLNLLQEDNPDLIGSEIARWLSTLEISGGSGGSGGGGSGGMVFTLEDFVGDWEQTAAYNLDQVLEQGGVSSLLQNLAVSVTPIQRIVRSGENALKIDIHVIIPYEGLSADQMAQIEEVFKVVYPVDDHHFKVILPYGTLVIDGVTPNMLNYFGRPYEGIAVFDGKKITVTGTLWNGNKIIDERLITPDGSMLFRVTINS

SEQ ID NO: 3194 - protein, 448 aa, Synthetic construct
MFHYVDVGPRDGTPVLFLHGNPTSSYVWRNIIPHVAPTHRCIAPDLIGMGKSDKPDIGYFFDDHVRFMDAFIEALGLEEVVLVIHDWGSALGFHWAKRNPERVKGIAFMEFIRPIPTWDEWPEFARETFQAFRTTDVGRKLIIDQNVMIEGTLPMGVVRPLTEVEMDHYREPFLNPVDREPLWRFPNELPIAGEPANIVALVEEYMDWLHQSPVPKLLFWGTPGVLIPPAEAARLAKSLPNCKAVDIGPGLNLLQEDNPDLIGSEIARWLSTLEISGGSGGSGGGGSGGMVFTLEDFVGDWEQTAAYNLDQVLEQGGVSSLLQNLAVSVTPIQRIVRSGENALKIDIHVIIPYEGLSADQMAQIEEVFKVVYPVDDHHFKVILPYGTLVIDGVTPNMLNYFGRPYEGIAVFDGKKITVTGTLWNGNKIIDERLITPDGSMLFRVTINS

SEQ ID NO: 3195 - protein, 448 aa, Synthetic construct
MFHYVDVGPRDGTPVLFLHGNPTSSYVWRNIIPHVAPTHRCIAPDLIGMGKSDKPDIGYFFDDHVRFMDAFIEALGLEEVVLVIHDWGSALGFHWAKRNPERVKGIAFMEFIRPIPTWDEWPEFARETFQAFRTTDVGRKLIIDQNVFIEGTLPMGVVRPLTEVEMDHYREPFLNPEDREPLWRFPNELPIAGEPANIVALVEEYMDWLHQSPVPKLLFWGTPGVLIPPAEAARLAKSLPNCKAVDIGPGLNLLQEDNPDLIGSEIARWLSTLEISGGSGGSGGGGSGGMVFTLEDFVGDWEQTAAYNLDQVLEQGGVSSLLQNLAVSVTPIQRIVRSGENALKIDIHVIIPYEGLSADQMAQIEEVFKVVYPVDDHHFKVILPYGTLVIDGVTPNMLNYFGRPYEGIAVFDGKKITVTGTLWNGNKIIDERLITPDGSMLFRVTINS

SEQ ID NO: 3196 - protein, 448 aa, Synthetic construct
MFHYVDVGPRDGTPVLFLHGNPTSSYVWRNIIPHVAPTHRCIAPDLIGMGKSDKPDIGYFFDDHVRFMDAFIEALGLEEVVLVIHDWGSALGFHWAKRNPERVKGIAFMEFIRPIPTWDEWPEFARETFQAFRTTDVGRKLIIDQNVFIEGTLPMGVVRPLTEVEMDHYREPFLNPQDREPLWRFPNELPIAGEPANIVALVEEYMDWLHQSPVPKLLFWGTPGVLIPPAEAARLAKSLPNCKAVDIGPGLNLLQEDNPDLIGSEIARWLSTLEISGGSGGSGGGGSGGMVFTLEDFVGDWEQTAAYNLDQVLEQGGVSSLLQNLAVSVTPIQRIVRSGENALKIDIHVIIPYEGLSADQMAQIEEVFKVVYPVDDHHFKVILPYGTLVIDGVTPNMLNYFGRPYEGIAVFDGKKITVTGTLWNGNKIIDERLITPDGSMLFRVTINS

SEQ ID NO: 3197 - protein, 448 aa, Synthetic construct
MFHYVDVGPRDGTPVLFLHGNPTSSYVWRNIIPHVAPTHRCIAPDLIGMGKSDKPDIGYFFDDHVRFMDAFIEALGLEEVVLVIHDWGSALGFHWAKRNPERVKGIAFMEFIRPIPTWDEWPEFARETFQAFRTTDVGRKLIIDQNVFIEGTLPMGVVRPLTEVEMDHYREPFLNPVDREPLWRFANELPIAGEPANIVALVEEYMDWLHQSPVPKLLFWGTPGVLIPPAEAARLAKSLPNCKAVDIGPGLNLLQEDNPDLIGSEIARWLSTLEISGGSGGSGGGGSGGMVFTLEDFVGDWEQTAAYNLDQVLEQGGVSSLLQNLAVSVTPIQRIVRSGENALKIDIHVIIPYEGLSADQMAQIEEVFKVVYPVDDHHFKVILPYGTLVIDGVTPNMLNYFGRPYEGIAVFDGKKITVTGTLWNGNKIIDERLITPDGSMLFRVTINS

SEQ ID NO: 3198 - protein, 448 aa, Synthetic construct
MFHYVDVGPRDGTPVLFLHGNPTSSYVWRNIIPHVAPTHRCIAPDLIGMGKSDKPDIGYFFDDHVRFMDAFIEALGLEEVVLVIHDWGSALGFHWAKRNPERVKGIAFMEFIRPIPTWDEWPEFARETFQAFRTTDVGRKLIIDQNVFIEGTLPMGVVRPLTEVEMDHYREPFLNPVDREPLWRFVNELPIAGEPANIVALVEEYMDWLHQSPVPKLLFWGTPGVLIPPAEAARLAKSLPNCKAVDIGPGLNLLQEDNPDLIGSEIARWLSTLEISGGSGGSGGGGSGGMVFTLEDFVGDWEQTAAYNLDQVLEQGGVSSLLQNLAVSVTPIQRIVRSGENALKIDIHVIIPYEGLSADQMAQIEEVFKVVYPVDDHHFKVILPYGTLVIDGVTPNMLNYFGRPYEGIAVFDGKKITVTGTLWNGNKIIDERLITPDGSMLFRVTINS

SEQ ID NO: 3199 - protein, 448 aa, Synthetic construct
MFHYVDVGPRDGTPVLFLHGNPTSSYVWRNIIPHVAPTHRCIAPDLIGMGKSDKPDIGYFFDDHVRFMDAFIEALGLEEVVLVIHDWGSALGFHWAKRNPERVKGIAFMEFIRPIPTWDEWPEFARETFQAFRTTDVGRKLIIDQNVFIEGTLPMGVVRPLTEVEMDHYREPFLNPVDREPLWRFPNELPIAGEPANIVALVEEYMDWLHQSPVPKLLFWGTPGVLIPPAEAARLAKALPNCKAVDIGPGLNLLQEDNPDLIGSEIARWLSTLEISGGSGGSGGGGSGGMVFTLEDFVGDWEQTAAYNLDQVLEQGGVSSLLQNLAVSVTPIQRIVRSGENALKIDIHVIIPYEGLSADQMAQIEEVFKVVYPVDDHHFKVILPYGTLVIDGVTPNMLNYFGRPYEGIAVFDGKKITVTGTLWNGNKIIDERLITPDGSMLFRVTINS

SEQ ID NO: 3200 - protein, 448 aa, Synthetic construct
MFHYVDVGPRDGTPVLFLHGNPTSSYVWRNIIPHVAPTHRCIAPDLIGMGKSDKPDIGYFFDDHVRFMDAFIEALGLEEVVLVIHDWGSALGFHWAKRNPERVKGIAFMEFIRPIPTWDEWPEFARETFQAFRTTDVGRKLIIDQNVFIEGTLPMGVVRPLTEVEMDHYREPFLNPVDREPLWRFPNELPIAGEPANIVALVEEYMDWLHQSPVPKLLFWGTPGVLIPPAEAARLAKSLPNCKAVDIGPGLNILQEDNPDLIGSEIARWLSTLEISGGSGGSGGGGSGGMVFTLEDFVGDWEQTAAYNLDQVLEQGGVSSLLQNLAVSVTPIQRIVRSGENALKIDIHVIIPYEGLSADQMAQIEEVFKVVYPVDDHHFKVILPYGTLVIDGVTPNMLNYFGRPYEGIAVFDGKKITVTGTLWNGNKIIDERLITPDGSMLFRVTINS

SEQ ID NO: 3201 - protein, 448 aa, Synthetic construct
MFHYVDVGPRDGTPVLFLHGNPTSSYVWRNIIPHVAPTHRCIAPDLIGMGKSDKPDLGYFFDDHVRFMDAFIEALGLEKVVLVIHDWGAALGFHWAKRNPERVKGIAFMEFIRPIPTWDEWPEFARETFQAFRTTDVGRKLIIDQNVFIEGTLPMGVVRPLTEVEMDHYREPFLNPVDREPLWRFPNELPIAGEPANIVALVEEYMDWLHQSPVPKLLFWGTPGVLIPPAEAARLAKSLPNCKAVDIGPGLNLLQEDNPDLIGSEIARWLSTLEISGGSGGSGGGGSGGMVFTLEDFVGDWEQTAAYNLDQVLEQGGVSSLLQNLAVSVTPIQRIVRSGENALKIDIHVIIPYEGLSADQMAQIEEVFKVVYPVDDHHFKVILPYGTLVIDGVTPNMLNYFGRPYEGIAVFDGKKITVTGTLWNGNKIIDERLITPDGSMLFRVTINS

SEQ ID NO: 3202 - protein, 448 aa, Synthetic construct
MFHYVDVGPRDGTPVLFLHGNPTSSYVWRNIIPHVAPTHRCIAPDLIGMGKSDKPDLGYFFDDHVRFMDAFIEALGLEKVVLVIHDWGSALGLHWAKRNPERVKGIAFMEFIRPIPTWDEWPEFARETFQAFRTTDVGRKLIIDQNVFIEGTLPMGVVRPLTEVEMDHYREPFLNPVDREPLWRFPNELPIAGEPANIVALVEEYMDWLHQSPVPKLLFWGTPGVLIPPAEAARLAKSLPNCKAVDIGPGLNLLQEDNPDLIGSEIARWLSTLEISGGSGGSGGGGSGGMVFTLEDFVGDWEQTAAYNLDQVLEQGGVSSLLQNLAVSVTPIQRIVRSGENALKIDIHVIIPYEGLSADQMAQIEEVFKVVYPVDDHHFKVILPYGTLVIDGVTPNMLNYFGRPYEGIAVFDGKKITVTGTLWNGNKIIDERLITPDGSMLFRVTINS

SEQ ID NO: 3203 - protein, 448 aa, Synthetic construct
MFHYVDVGPRDGTPVLFLHGNPTSSYVWRNIIPHVAPTHRCIAPDLIGMGKSDKPDLGYFFDDHVRFMDAFIEALGLEKVVLVIHDWGSALGFHWAKRNPERVKGIAFMEFIRPIPTWDEWPEFAREMFQAFRTTDVGRKLIIDQNVFIEGTLPMGVVRPLTEVEMDHYREPFLNPVDREPLWRFPNELPIAGEPANIVALVEEYMDWLHQSPVPKLLFWGTPGVLIPPAEAARLAKSLPNCKAVDIGPGLNLLQEDNPDLIGSEIARWLSTLEISGGSGGSGGGGSGGMVFTLEDFVGDWEQTAAYNLDQVLEQGGVSSLLQNLAVSVTPIQRIVRSGENALKIDIHVIIPYEGLSADQMAQIEEVFKVVYPVDDHHFKVILPYGTLVIDGVTPNMLNYFGRPYEGIAVFDGKKITVTGTLWNGNKIIDERLITPDGSMLFRVTINS

SEQ ID NO: 3204 - protein, 448 aa, Synthetic construct
MFHYVDVGPRDGTPVLFLHGNPTSSYVWRNIIPHVAPTHRCIAPDLIGMGKSDKPDLGYFFDDHVRFMDAFIEALGLEKVVLVIHDWGSALGFHWAKRNPERVKGIAFMEFIRPIPTWDEWPEFARETFQQFRTTDVGRKLIIDQNVFIEGTLPMGVVRPLTEVEMDHYREPFLNPVDREPLWRFPNELPIAGEPANIVALVEEYMDWLHQSPVPKLLFWGTPGVLIPPAEAARLAKSLPNCKAVDIGPGLNLLQEDNPDLIGSEIARWLSTLEISGGSGGSGGGGSGGMVFTLEDFVGDWEQTAAYNLDQVLEQGGVSSLLQNLAVSVTPIQRIVRSGENALKIDIHVIIPYEGLSADQMAQIEEVFKVVYPVDDHHFKVILPYGTLVIDGVTPNMLNYFGRPYEGIAVFDGKKITVTGTLWNGNKIIDERLITPDGSMLFRVTINS

SEQ ID NO: 3205 - protein, 448 aa, Synthetic construct
MFHYVDVGPRDGTPVLFLHGNPTSSYVWRNIIPHVAPTHRCIAPDLIGMGKSDKPDLGYFFDDHVRFMDAFIEALGLEKVVLVIHDWGSALGFHWAKRNPERVKGIAFMEFIRPIPTWDEWPEFARETFQAFRTEDVGRKLIIDQNVFIEGTLPMGVVRPLTEVEMDHYREPFLNPVDREPLWRFPNELPIAGEPANIVALVEEYMDWLHQSPVPKLLFWGTPGVLIPPAEAARLAKSLPNCKAVDIGPGLNLLQEDNPDLIGSEIARWLSTLEISGGSGGSGGGGSGGMVFTLEDFVGDWEQTAAYNLDQVLEQGGVSSLLQNLAVSVTPIQRIVRSGENALKIDIHVIIPYEGLSADQMAQIEEVFKVVYPVDDHHFKVILPYGTLVIDGVTPNMLNYFGRPYEGIAVFDGKKITVTGTLWNGNKIIDERLITPDGSMLFRVTINS

SEQ ID NO: 3206 - protein, 448 aa, Synthetic construct
MFHYVDVGPRDGTPVLFLHGNPTSSYVWRNIIPHVAPTHRCIAPDLIGMGKSDKPDLGYFFDDHVRFMDAFIEALGLEKVVLVIHDWGSALGFHWAKRNPERVKGIAFMEFIRPIPTWDEWPEFARETFQAFRTTDVGRKLIIDQNVMIEGTLPMGVVRPLTEVEMDHYREPFLNPVDREPLWRFPNELPIAGEPANIVALVEEYMDWLHQSPVPKLLFWGTPGVLIPPAEAARLAKSLPNCKAVDIGPGLNLLQEDNPDLIGSEIARWLSTLEISGGSGGSGGGGSGGMVFTLEDFVGDWEQTAAYNLDQVLEQGGVSSLLQNLAVSVTPIQRIVRSGENALKIDIHVIIPYEGLSADQMAQIEEVFKVVYPVDDHHFKVILPYGTLVIDGVTPNMLNYFGRPYEGIAVFDGKKITVTGTLWNGNKIIDERLITPDGSMLFRVTINS

SEQ ID NO: 3207 - protein, 448 aa, Synthetic construct
MFHYVDVGPRDGTPVLFLHGNPTSSYVWRNIIPHVAPTHRCIAPDLIGMGKSDKPDLGYFFDDHVRFMDAFIEALGLEKVVLVIHDWGSALGFHWAKRNPERVKGIAFMEFIRPIPTWDEWPEFARETFQAFRTTDVGRKLIIDQNVFIEGTLPMGVVRPLTEVEMDHYREPFLNPEDREPLWRFPNELPIAGEPANIVALVEEYMDWLHQSPVPKLLFWGTPGVLIPPAEAARLAKSLPNCKAVDIGPGLNLLQEDNPDLIGSEIARWLSTLEISGGSGGSGGGGSGGMVFTLEDFVGDWEQTAAYNLDQVLEQGGVSSLLQNLAVSVTPIQRIVRSGENALKIDIHVIIPYEGLSADQMAQIEEVFKVVYPVDDHHFKVILPYGTLVIDGVTPNMLNYFGRPYEGIAVFDGKKITVTGTLWNGNKIIDERLITPDGSMLFRVTINS

SEQ ID NO: 3208 - protein, 448 aa, Synthetic construct
MFHYVDVGPRDGTPVLFLHGNPTSSYVWRNIIPHVAPTHRCIAPDLIGMGKSDKPDLGYFFDDHVRFMDAFIEALGLEKVVLVIHDWGSALGFHWAKRNPERVKGIAFMEFIRPIPTWDEWPEFARETFQAFRTTDVGRKLIIDQNVFIEGTLPMGVVRPLTEVEMDHYREPFLNPQDREPLWRFPNELPIAGEPANIVALVEEYMDWLHQSPVPKLLFWGTPGVLIPPAEAARLAKSLPNCKAVDIGPGLNLLQEDNPDLIGSEIARWLSTLEISGGSGGSGGGGSGGMVFTLEDFVGDWEQTAAYNLDQVLEQGGVSSLLQNLAVSVTPIQRIVRSGENALKIDIHVIIPYEGLSADQMAQIEEVFKVVYPVDDHHFKVILPYGTLVIDGVTPNMLNYFGRPYEGIAVFDGKKITVTGTLWNGNKIIDERLITPDGSMLFRVTINS

SEQ ID NO: 3209 - protein, 448 aa, Synthetic construct
MFHYVDVGPRDGTPVLFLHGNPTSSYVWRNIIPHVAPTHRCIAPDLIGMGKSDKPDLGYFFDDHVRFMDAFIEALGLEKVVLVIHDWGSALGFHWAKRNPERVKGIAFMEFIRPIPTWDEWPEFARETFQAFRTTDVGRKLIIDQNVFIEGTLPMGVVRPLTEVEMDHYREPFLNPVDREPLWRFANELPIAGEPANIVALVEEYMDWLHQSPVPKLLFWGTPGVLIPPAEAARLAKSLPNCKAVDIGPGLNLLQEDNPDLIGSEIARWLSTLEISGGSGGSGGGGSGGMVFTLEDFVGDWEQTAAYNLDQVLEQGGVSSLLQNLAVSVTPIQRIVRSGENALKIDIHVIIPYEGLSADQMAQIEEVFKVVYPVDDHHFKVILPYGTLVIDGVTPNMLNYFGRPYEGIAVFDGKKITVTGTLWNGNKIIDERLITPDGSMLFRVTINS

SEQ ID NO: 3210 - protein, 448 aa, Synthetic construct
MFHYVDVGPRDGTPVLFLHGNPTSSYVWRNIIPHVAPTHRCIAPDLIGMGKSDKPDLGYFFDDHVRFMDAFIEALGLEKVVLVIHDWGSALGFHWAKRNPERVKGIAFMEFIRPIPTWDEWPEFARETFQAFRTTDVGRKLIIDQNVFIEGTLPMGVVRPLTEVEMDHYREPFLNPVDREPLWRFVNELPIAGEPANIVALVEEYMDWLHQSPVPKLLFWGTPGVLIPPAEAARLAKSLPNCKAVDIGPGLNLLQEDNPDLIGSEIARWLSTLEISGGSGGSGGGGSGGMVFTLEDFVGDWEQTAAYNLDQVLEQGGVSSLLQNLAVSVTPIQRIVRSGENALKIDIHVIIPYEGLSADQMAQIEEVFKVVYPVDDHHFKVILPYGTLVIDGVTPNMLNYFGRPYEGIAVFDGKKITVTGTLWNGNKIIDERLITPDGSMLFRVTINS

SEQ ID NO: 3211 - protein, 448 aa, Synthetic construct
MFHYVDVGPRDGTPVLFLHGNPTSSYVWRNIIPHVAPTHRCIAPDLIGMGKSDKPDLGYFFDDHVRFMDAFIEALGLEKVVLVIHDWGSALGFHWAKRNPERVKGIAFMEFIRPIPTWDEWPEFARETFQAFRTTDVGRKLIIDQNVFIEGTLPMGVVRPLTEVEMDHYREPFLNPVDREPLWRFPNELPIAGEPANIVALVEEYMDWLHQSPVPKLLFWGTPGVLIPPAEAARLAKALPNCKAVDIGPGLNLLQEDNPDLIGSEIARWLSTLEISGGSGGSGGGGSGGMVFTLEDFVGDWEQTAAYNLDQVLEQGGVSSLLQNLAVSVTPIQRIVRSGENALKIDIHVIIPYEGLSADQMAQIEEVFKVVYPVDDHHFKVILPYGTLVIDGVTPNMLNYFGRPYEGIAVFDGKKITVTGTLWNGNKIIDERLITPDGSMLFRVTINS

SEQ ID NO: 3212 - protein, 448 aa, Synthetic construct
MFHYVDVGPRDGTPVLFLHGNPTSSYVWRNIIPHVAPTHRCIAPDLIGMGKSDKPDLGYFFDDHVRFMDAFIEALGLEKVVLVIHDWGSALGFHWAKRNPERVKGIAFMEFIRPIPTWDEWPEFARETFQAFRTTDVGRKLIIDQNVFIEGTLPMGVVRPLTEVEMDHYREPFLNPVDREPLWRFPNELPIAGEPANIVALVEEYMDWLHQSPVPKLLFWGTPGVLIPPAEAARLAKSLPNCKAVDIGPGLNILQEDNPDLIGSEIARWLSTLEISGGSGGSGGGGSGGMVFTLEDFVGDWEQTAAYNLDQVLEQGGVSSLLQNLAVSVTPIQRIVRSGENALKIDIHVIIPYEGLSADQMAQIEEVFKVVYPVDDHHFKVILPYGTLVIDGVTPNMLNYFGRPYEGIAVFDGKKITVTGTLWNGNKIIDERLITPDGSMLFRVTINS

SEQ ID NO: 3213 - protein, 448 aa, Synthetic construct
MFHYVDVGPRDGTPVLFLHGNPTSSYVWRNIIPHVAPTHRCIAPDLIGMGKSDKPDLGYFFDDHVRFMDAFIEALGLEEVVLVIHDWGAALGLHWAKRNPERVKGIAFMEFIRPIPTWDEWPEFARETFQAFRTTDVGRKLIIDQNVFIEGTLPMGVVRPLTEVEMDHYREPFLNPVDREPLWRFPNELPIAGEPANIVALVEEYMDWLHQSPVPKLLFWGTPGVLIPPAEAARLAKSLPNCKAVDIGPGLNLLQEDNPDLIGSEIARWLSTLEISGGSGGSGGGGSGGMVFTLEDFVGDWEQTAAYNLDQVLEQGGVSSLLQNLAVSVTPIQRIVRSGENALKIDIHVIIPYEGLSADQMAQIEEVFKVVYPVDDHHFKVILPYGTLVIDGVTPNMLNYFGRPYEGIAVFDGKKITVTGTLWNGNKIIDERLITPDGSMLFRVTINS

SEQ ID NO: 3214 - protein, 448 aa, Synthetic construct
MFHYVDVGPRDGTPVLFLHGNPTSSYVWRNIIPHVAPTHRCIAPDLIGMGKSDKPDLGYFFDDHVRFMDAFIEALGLEEVVLVIHDWGAALGFHWAKRNPERVKGIAFMEFIRPIPTWDEWPEFAREMFQAFRTTDVGRKLIIDQNVFIEGTLPMGVVRPLTEVEMDHYREPFLNPVDREPLWRFPNELPIAGEPANIVALVEEYMDWLHQSPVPKLLFWGTPGVLIPPAEAARLAKSLPNCKAVDIGPGLNLLQEDNPDLIGSEIARWLSTLEISGGSGGSGGGGSGGMVFTLEDFVGDWEQTAAYNLDQVLEQGGVSSLLQNLAVSVTPIQRIVRSGENALKIDIHVIIPYEGLSADQMAQIEEVFKVVYPVDDHHFKVILPYGTLVIDGVTPNMLNYFGRPYEGIAVFDGKKITVTGTLWNGNKIIDERLITPDGSMLFRVTINS

SEQ ID NO: 3215 - protein, 448 aa, Synthetic construct
MFHYVDVGPRDGTPVLFLHGNPTSSYVWRNIIPHVAPTHRCIAPDLIGMGKSDKPDLGYFFDDHVRFMDAFIEALGLEEVVLVIHDWGAALGFHWAKRNPERVKGIAFMEFIRPIPTWDEWPEFARETFQQFRTTDVGRKLIIDQNVFIEGTLPMGVVRPLTEVEMDHYREPFLNPVDREPLWRFPNELPIAGEPANIVALVEEYMDWLHQSPVPKLLFWGTPGVLIPPAEAARLAKSLPNCKAVDIGPGLNLLQEDNPDLIGSEIARWLSTLEISGGSGGSGGGGSGGMVFTLEDFVGDWEQTAAYNLDQVLEQGGVSSLLQNLAVSVTPIQRIVRSGENALKIDIHVIIPYEGLSADQMAQIEEVFKVVYPVDDHHFKVILPYGTLVIDGVTPNMLNYFGRPYEGIAVFDGKKITVTGTLWNGNKIIDERLITPDGSMLFRVTINS

SEQ ID NO: 3216 - protein, 448 aa, Synthetic construct
MFHYVDVGPRDGTPVLFLHGNPTSSYVWRNIIPHVAPTHRCIAPDLIGMGKSDKPDLGYFFDDHVRFMDAFIEALGLEEVVLVIHDWGAALGFHWAKRNPERVKGIAFMEFIRPIPTWDEWPEFARETFQAFRTEDVGRKLIIDQNVFIEGTLPMGVVRPLTEVEMDHYREPFLNPVDREPLWRFPNELPIAGEPANIVALVEEYMDWLHQSPVPKLLFWGTPGVLIPPAEAARLAKSLPNCKAVDIGPGLNLLQEDNPDLIGSEIARWLSTLEISGGSGGSGGGGSGGMVFTLEDFVGDWEQTAAYNLDQVLEQGGVSSLLQNLAVSVTPIQRIVRSGENALKIDIHVIIPYEGLSADQMAQIEEVFKVVYPVDDHHFKVILPYGTLVIDGVTPNMLNYFGRPYEGIAVFDGKKITVTGTLWNGNKIIDERLITPDGSMLFRVTINS

SEQ ID NO: 3217 - protein, 448 aa, Synthetic construct
MFHYVDVGPRDGTPVLFLHGNPTSSYVWRNIIPHVAPTHRCIAPDLIGMGKSDKPDLGYFFDDHVRFMDAFIEALGLEEVVLVIHDWGAALGFHWAKRNPERVKGIAFMEFIRPIPTWDEWPEFARETFQAFRTTDVGRKLIIDQNVMIEGTLPMGVVRPLTEVEMDHYREPFLNPVDREPLWRFPNELPIAGEPANIVALVEEYMDWLHQSPVPKLLFWGTPGVLIPPAEAARLAKSLPNCKAVDIGPGLNLLQEDNPDLIGSEIARWLSTLEISGGSGGSGGGGSGGMVFTLEDFVGDWEQTAAYNLDQVLEQGGVSSLLQNLAVSVTPIQRIVRSGENALKIDIHVIIPYEGLSADQMAQIEEVFKVVYPVDDHHFKVILPYGTLVIDGVTPNMLNYFGRPYEGIAVFDGKKITVTGTLWNGNKIIDERLITPDGSMLFRVTINS

SEQ ID NO: 3218 - protein, 448 aa, Synthetic construct
MFHYVDVGPRDGTPVLFLHGNPTSSYVWRNIIPHVAPTHRCIAPDLIGMGKSDKPDLGYFFDDHVRFMDAFIEALGLEEVVLVIHDWGAALGFHWAKRNPERVKGIAFMEFIRPIPTWDEWPEFARETFQAFRTTDVGRKLIIDQNVFIEGTLPMGVVRPLTEVEMDHYREPFLNPEDREPLWRFPNELPIAGEPANIVALVEEYMDWLHQSPVPKLLFWGTPGVLIPPAEAARLAKSLPNCKAVDIGPGLNLLQEDNPDLIGSEIARWLSTLEISGGSGGSGGGGSGGMVFTLEDFVGDWEQTAAYNLDQVLEQGGVSSLLQNLAVSVTPIQRIVRSGENALKIDIHVIIPYEGLSADQMAQIEEVFKVVYPVDDHHFKVILPYGTLVIDGVTPNMLNYFGRPYEGIAVFDGKKITVTGTLWNGNKIIDERLITPDGSMLFRVTINS

SEQ ID NO: 3219 - protein, 448 aa, Synthetic construct
MFHYVDVGPRDGTPVLFLHGNPTSSYVWRNIIPHVAPTHRCIAPDLIGMGKSDKPDLGYFFDDHVRFMDAFIEALGLEEVVLVIHDWGAALGFHWAKRNPERVKGIAFMEFIRPIPTWDEWPEFARETFQAFRTTDVGRKLIIDQNVFIEGTLPMGVVRPLTEVEMDHYREPFLNPQDREPLWRFPNELPIAGEPANIVALVEEYMDWLHQSPVPKLLFWGTPGVLIPPAEAARLAKSLPNCKAVDIGPGLNLLQEDNPDLIGSEIARWLSTLEISGGSGGSGGGGSGGMVFTLEDFVGDWEQTAAYNLDQVLEQGGVSSLLQNLAVSVTPIQRIVRSGENALKIDIHVIIPYEGLSADQMAQIEEVFKVVYPVDDHHFKVILPYGTLVIDGVTPNMLNYFGRPYEGIAVFDGKKITVTGTLWNGNKIIDERLITPDGSMLFRVTINS

SEQ ID NO: 3220 - protein, 448 aa, Synthetic construct
MFHYVDVGPRDGTPVLFLHGNPTSSYVWRNIIPHVAPTHRCIAPDLIGMGKSDKPDLGYFFDDHVRFMDAFIEALGLEEVVLVIHDWGAALGFHWAKRNPERVKGIAFMEFIRPIPTWDEWPEFARETFQAFRTTDVGRKLIIDQNVFIEGTLPMGVVRPLTEVEMDHYREPFLNPVDREPLWRFANELPIAGEPANIVALVEEYMDWLHQSPVPKLLFWGTPGVLIPPAEAARLAKSLPNCKAVDIGPGLNLLQEDNPDLIGSEIARWLSTLEISGGSGGSGGGGSGGMVFTLEDFVGDWEQTAAYNLDQVLEQGGVSSLLQNLAVSVTPIQRIVRSGENALKIDIHVIIPYEGLSADQMAQIEEVFKVVYPVDDHHFKVILPYGTLVIDGVTPNMLNYFGRPYEGIAVFDGKKITVTGTLWNGNKIIDERLITPDGSMLFRVTINS

SEQ ID NO: 3221 - protein, 448 aa, Synthetic construct
MFHYVDVGPRDGTPVLFLHGNPTSSYVWRNIIPHVAPTHRCIAPDLIGMGKSDKPDLGYFFDDHVRFMDAFIEALGLEEVVLVIHDWGAALGFHWAKRNPERVKGIAFMEFIRPIPTWDEWPEFARETFQAFRTTDVGRKLIIDQNVFIEGTLPMGVVRPLTEVEMDHYREPFLNPVDREPLWRFVNELPIAGEPANIVALVEEYMDWLHQSPVPKLLFWGTPGVLIPPAEAARLAKSLPNCKAVDIGPGLNLLQEDNPDLIGSEIARWLSTLEISGGSGGSGGGGSGGMVFTLEDFVGDWEQTAAYNLDQVLEQGGVSSLLQNLAVSVTPIQRIVRSGENALKIDIHVIIPYEGLSADQMAQIEEVFKVVYPVDDHHFKVILPYGTLVIDGVTPNMLNYFGRPYEGIAVFDGKKITVTGTLWNGNKIIDERLITPDGSMLFRVTINS

SEQ ID NO: 3222 - protein, 448 aa, Synthetic construct
MFHYVDVGPRDGTPVLFLHGNPTSSYVWRNIIPHVAPTHRCIAPDLIGMGKSDKPDLGYFFDDHVRFMDAFIEALGLEEVVLVIHDWGAALGFHWAKRNPERVKGIAFMEFIRPIPTWDEWPEFARETFQAFRTTDVGRKLIIDQNVFIEGTLPMGVVRPLTEVEMDHYREPFLNPVDREPLWRFPNELPIAGEPANIVALVEEYMDWLHQSPVPKLLFWGTPGVLIPPAEAARLAKALPNCKAVDIGPGLNLLQEDNPDLIGSEIARWLSTLEISGGSGGSGGGGSGGMVFTLEDFVGDWEQTAAYNLDQVLEQGGVSSLLQNLAVSVTPIQRIVRSGENALKIDIHVIIPYEGLSADQMAQIEEVFKVVYPVDDHHFKVILPYGTLVIDGVTPNMLNYFGRPYEGIAVFDGKKITVTGTLWNGNKIIDERLITPDGSMLFRVTINS

SEQ ID NO: 3223 - protein, 448 aa, Synthetic construct
MFHYVDVGPRDGTPVLFLHGNPTSSYVWRNIIPHVAPTHRCIAPDLIGMGKSDKPDLGYFFDDHVRFMDAFIEALGLEEVVLVIHDWGAALGFHWAKRNPERVKGIAFMEFIRPIPTWDEWPEFARETFQAFRTTDVGRKLIIDQNVFIEGTLPMGVVRPLTEVEMDHYREPFLNPVDREPLWRFPNELPIAGEPANIVALVEEYMDWLHQSPVPKLLFWGTPGVLIPPAEAARLAKSLPNCKAVDIGPGLNILQEDNPDLIGSEIARWLSTLEISGGSGGSGGGGSGGMVFTLEDFVGDWEQTAAYNLDQVLEQGGVSSLLQNLAVSVTPIQRIVRSGENALKIDIHVIIPYEGLSADQMAQIEEVFKVVYPVDDHHFKVILPYGTLVIDGVTPNMLNYFGRPYEGIAVFDGKKITVTGTLWNGNKIIDERLITPDGSMLFRVTINS

SEQ ID NO: 3224 - protein, 448 aa, Synthetic construct
MFHYVDVGPRDGTPVLFLHGNPTSSYVWRNIIPHVAPTHRCIAPDLIGMGKSDKPDLGYFFDDHVRFMDAFIEALGLEEVVLVIHDWGSALGLHWAKRNPERVKGIAFMEFIRPIPTWDEWPEFAREMFQAFRTTDVGRKLIIDQNVFIEGTLPMGVVRPLTEVEMDHYREPFLNPVDREPLWRFPNELPIAGEPANIVALVEEYMDWLHQSPVPKLLFWGTPGVLIPPAEAARLAKSLPNCKAVDIGPGLNLLQEDNPDLIGSEIARWLSTLEISGGSGGSGGGGSGGMVFTLEDFVGDWEQTAAYNLDQVLEQGGVSSLLQNLAVSVTPIQRIVRSGENALKIDIHVIIPYEGLSADQMAQIEEVFKVVYPVDDHHFKVILPYGTLVIDGVTPNMLNYFGRPYEGIAVFDGKKITVTGTLWNGNKIIDERLITPDGSMLFRVTINS

SEQ ID NO: 3225 - protein, 448 aa, Synthetic construct
MFHYVDVGPRDGTPVLFLHGNPTSSYVWRNIIPHVAPTHRCIAPDLIGMGKSDKPDLGYFFDDHVRFMDAFIEALGLEEVVLVIHDWGSALGLHWAKRNPERVKGIAFMEFIRPIPTWDEWPEFARETFQQFRTTDVGRKLIIDQNVFIEGTLPMGVVRPLTEVEMDHYREPFLNPVDREPLWRFPNELPIAGEPANIVALVEEYMDWLHQSPVPKLLFWGTPGVLIPPAEAARLAKSLPNCKAVDIGPGLNLLQEDNPDLIGSEIARWLSTLEISGGSGGSGGGGSGGMVFTLEDFVGDWEQTAAYNLDQVLEQGGVSSLLQNLAVSVTPIQRIVRSGENALKIDIHVIIPYEGLSADQMAQIEEVFKVVYPVDDHHFKVILPYGTLVIDGVTPNMLNYFGRPYEGIAVFDGKKITVTGTLWNGNKIIDERLITPDGSMLFRVTINS

SEQ ID NO: 3226 - protein, 448 aa, Synthetic construct
MFHYVDVGPRDGTPVLFLHGNPTSSYVWRNIIPHVAPTHRCIAPDLIGMGKSDKPDLGYFFDDHVRFMDAFIEALGLEEVVLVIHDWGSALGLHWAKRNPERVKGIAFMEFIRPIPTWDEWPEFARETFQAFRTEDVGRKLIIDQNVFIEGTLPMGVVRPLTEVEMDHYREPFLNPVDREPLWRFPNELPIAGEPANIVALVEEYMDWLHQSPVPKLLFWGTPGVLIPPAEAARLAKSLPNCKAVDIGPGLNLLQEDNPDLIGSEIARWLSTLEISGGSGGSGGGGSGGMVFTLEDFVGDWEQTAAYNLDQVLEQGGVSSLLQNLAVSVTPIQRIVRSGENALKIDIHVIIPYEGLSADQMAQIEEVFKVVYPVDDHHFKVILPYGTLVIDGVTPNMLNYFGRPYEGIAVFDGKKITVTGTLWNGNKIIDERLITPDGSMLFRVTINS

SEQ ID NO: 3227 - protein, 448 aa, Synthetic construct
MFHYVDVGPRDGTPVLFLHGNPTSSYVWRNIIPHVAPTHRCIAPDLIGMGKSDKPDLGYFFDDHVRFMDAFIEALGLEEVVLVIHDWGSALGLHWAKRNPERVKGIAFMEFIRPIPTWDEWPEFARETFQAFRTTDVGRKLIIDQNVMIEGTLPMGVVRPLTEVEMDHYREPFLNPVDREPLWRFPNELPIAGEPANIVALVEEYMDWLHQSPVPKLLFWGTPGVLIPPAEAARLAKSLPNCKAVDIGPGLNLLQEDNPDLIGSEIARWLSTLEISGGSGGSGGGGSGGMVFTLEDFVGDWEQTAAYNLDQVLEQGGVSSLLQNLAVSVTPIQRIVRSGENALKIDIHVIIPYEGLSADQMAQIEEVFKVVYPVDDHHFKVILPYGTLVIDGVTPNMLNYFGRPYEGIAVFDGKKITVTGTLWNGNKIIDERLITPDGSMLFRVTINS

SEQ ID NO: 3228 - protein, 448 aa, Synthetic construct
MFHYVDVGPRDGTPVLFLHGNPTSSYVWRNIIPHVAPTHRCIAPDLIGMGKSDKPDLGYFFDDHVRFMDAFIEALGLEEVVLVIHDWGSALGLHWAKRNPERVKGIAFMEFIRPIPTWDEWPEFARETFQAFRTTDVGRKLIIDQNVFIEGTLPMGVVRPLTEVEMDHYREPFLNPEDREPLWRFPNELPIAGEPANIVALVEEYMDWLHQSPVPKLLFWGTPGVLIPPAEAARLAKSLPNCKAVDIGPGLNLLQEDNPDLIGSEIARWLSTLEISGGSGGSGGGGSGGMVFTLEDFVGDWEQTAAYNLDQVLEQGGVSSLLQNLAVSVTPIQRIVRSGENALKIDIHVIIPYEGLSADQMAQIEEVFKVVYPVDDHHFKVILPYGTLVIDGVTPNMLNYFGRPYEGIAVFDGKKITVTGTLWNGNKIIDERLITPDGSMLFRVTINS

SEQ ID NO: 3229 - protein, 448 aa, Synthetic construct
MFHYVDVGPRDGTPVLFLHGNPTSSYVWRNIIPHVAPTHRCIAPDLIGMGKSDKPDLGYFFDDHVRFMDAFIEALGLEEVVLVIHDWGSALGLHWAKRNPERVKGIAFMEFIRPIPTWDEWPEFARETFQAFRTTDVGRKLIIDQNVFIEGTLPMGVVRPLTEVEMDHYREPFLNPQDREPLWRFPNELPIAGEPANIVALVEEYMDWLHQSPVPKLLFWGTPGVLIPPAEAARLAKSLPNCKAVDIGPGLNLLQEDNPDLIGSEIARWLSTLEISGGSGGSGGGGSGGMVFTLEDFVGDWEQTAAYNLDQVLEQGGVSSLLQNLAVSVTPIQRIVRSGENALKIDIHVIIPYEGLSADQMAQIEEVFKVVYPVDDHHFKVILPYGTLVIDGVTPNMLNYFGRPYEGIAVFDGKKITVTGTLWNGNKIIDERLITPDGSMLFRVTINS

SEQ ID NO: 3230 - protein, 448 aa, Synthetic construct
MFHYVDVGPRDGTPVLFLHGNPTSSYVWRNIIPHVAPTHRCIAPDLIGMGKSDKPDLGYFFDDHVRFMDAFIEALGLEEVVLVIHDWGSALGLHWAKRNPERVKGIAFMEFIRPIPTWDEWPEFARETFQAFRTTDVGRKLIIDQNVFIEGTLPMGVVRPLTEVEMDHYREPFLNPVDREPLWRFANELPIAGEPANIVALVEEYMDWLHQSPVPKLLFWGTPGVLIPPAEAARLAKSLPNCKAVDIGPGLNLLQEDNPDLIGSEIARWLSTLEISGGSGGSGGGGSGGMVFTLEDFVGDWEQTAAYNLDQVLEQGGVSSLLQNLAVSVTPIQRIVRSGENALKIDIHVIIPYEGLSADQMAQIEEVFKVVYPVDDHHFKVILPYGTLVIDGVTPNMLNYFGRPYEGIAVFDGKKITVTGTLWNGNKIIDERLITPDGSMLFRVTINS

SEQ ID NO: 3231 - protein, 448 aa, Synthetic construct
MFHYVDVGPRDGTPVLFLHGNPTSSYVWRNIIPHVAPTHRCIAPDLIGMGKSDKPDLGYFFDDHVRFMDAFIEALGLEEVVLVIHDWGSALGLHWAKRNPERVKGIAFMEFIRPIPTWDEWPEFARETFQAFRTTDVGRKLIIDQNVFIEGTLPMGVVRPLTEVEMDHYREPFLNPVDREPLWRFVNELPIAGEPANIVALVEEYMDWLHQSPVPKLLFWGTPGVLIPPAEAARLAKSLPNCKAVDIGPGLNLLQEDNPDLIGSEIARWLSTLEISGGSGGSGGGGSGGMVFTLEDFVGDWEQTAAYNLDQVLEQGGVSSLLQNLAVSVTPIQRIVRSGENALKIDIHVIIPYEGLSADQMAQIEEVFKVVYPVDDHHFKVILPYGTLVIDGVTPNMLNYFGRPYEGIAVFDGKKITVTGTLWNGNKIIDERLITPDGSMLFRVTINS

SEQ ID NO: 3232 - protein, 448 aa, Synthetic construct
MFHYVDVGPRDGTPVLFLHGNPTSSYVWRNIIPHVAPTHRCIAPDLIGMGKSDKPDLGYFFDDHVRFMDAFIEALGLEEVVLVIHDWGSALGLHWAKRNPERVKGIAFMEFIRPIPTWDEWPEFARETFQAFRTTDVGRKLIIDQNVFIEGTLPMGVVRPLTEVEMDHYREPFLNPVDREPLWRFPNELPIAGEPANIVALVEEYMDWLHQSPVPKLLFWGTPGVLIPPAEAARLAKALPNCKAVDIGPGLNLLQEDNPDLIGSEIARWLSTLEISGGSGGSGGGGSGGMVFTLEDFVGDWEQTAAYNLDQVLEQGGVSSLLQNLAVSVTPIQRIVRSGENALKIDIHVIIPYEGLSADQMAQIEEVFKVVYPVDDHHFKVILPYGTLVIDGVTPNMLNYFGRPYEGIAVFDGKKITVTGTLWNGNKIIDERLITPDGSMLFRVTINS

SEQ ID NO: 3233 - protein, 448 aa, Synthetic construct
MFHYVDVGPRDGTPVLFLHGNPTSSYVWRNIIPHVAPTHRCIAPDLIGMGKSDKPDLGYFFDDHVRFMDAFIEALGLEEVVLVIHDWGSALGLHWAKRNPERVKGIAFMEFIRPIPTWDEWPEFARETFQAFRTTDVGRKLIIDQNVFIEGTLPMGVVRPLTEVEMDHYREPFLNPVDREPLWRFPNELPIAGEPANIVALVEEYMDWLHQSPVPKLLFWGTPGVLIPPAEAARLAKSLPNCKAVDIGPGLNILQEDNPDLIGSEIARWLSTLEISGGSGGSGGGGSGGMVFTLEDFVGDWEQTAAYNLDQVLEQGGVSSLLQNLAVSVTPIQRIVRSGENALKIDIHVIIPYEGLSADQMAQIEEVFKVVYPVDDHHFKVILPYGTLVIDGVTPNMLNYFGRPYEGIAVFDGKKITVTGTLWNGNKIIDERLITPDGSMLFRVTINS

SEQ ID NO: 3234 - protein, 448 aa, Synthetic construct
MFHYVDVGPRDGTPVLFLHGNPTSSYVWRNIIPHVAPTHRCIAPDLIGMGKSDKPDLGYFFDDHVRFMDAFIEALGLEEVVLVIHDWGSALGFHWAKRNPERVKGIAFMEFIRPIPTWDEWPEFAREMFQQFRTTDVGRKLIIDQNVFIEGTLPMGVVRPLTEVEMDHYREPFLNPVDREPLWRFPNELPIAGEPANIVALVEEYMDWLHQSPVPKLLFWGTPGVLIPPAEAARLAKSLPNCKAVDIGPGLNLLQEDNPDLIGSEIARWLSTLEISGGSGGSGGGGSGGMVFTLEDFVGDWEQTAAYNLDQVLEQGGVSSLLQNLAVSVTPIQRIVRSGENALKIDIHVIIPYEGLSADQMAQIEEVFKVVYPVDDHHFKVILPYGTLVIDGVTPNMLNYFGRPYEGIAVFDGKKITVTGTLWNGNKIIDERLITPDGSMLFRVTINS

SEQ ID NO: 3235 - protein, 448 aa, Synthetic construct
MFHYVDVGPRDGTPVLFLHGNPTSSYVWRNIIPHVAPTHRCIAPDLIGMGKSDKPDLGYFFDDHVRFMDAFIEALGLEEVVLVIHDWGSALGFHWAKRNPERVKGIAFMEFIRPIPTWDEWPEFAREMFQAFRTEDVGRKLIIDQNVFIEGTLPMGVVRPLTEVEMDHYREPFLNPVDREPLWRFPNELPIAGEPANIVALVEEYMDWLHQSPVPKLLFWGTPGVLIPPAEAARLAKSLPNCKAVDIGPGLNLLQEDNPDLIGSEIARWLSTLEISGGSGGSGGGGSGGMVFTLEDFVGDWEQTAAYNLDQVLEQGGVSSLLQNLAVSVTPIQRIVRSGENALKIDIHVIIPYEGLSADQMAQIEEVFKVVYPVDDHHFKVILPYGTLVIDGVTPNMLNYFGRPYEGIAVFDGKKITVTGTLWNGNKIIDERLITPDGSMLFRVTINS

SEQ ID NO: 3236 - protein, 448 aa, Synthetic construct
MFHYVDVGPRDGTPVLFLHGNPTSSYVWRNIIPHVAPTHRCIAPDLIGMGKSDKPDLGYFFDDHVRFMDAFIEALGLEEVVLVIHDWGSALGFHWAKRNPERVKGIAFMEFIRPIPTWDEWPEFAREMFQAFRTTDVGRKLIIDQNVMIEGTLPMGVVRPLTEVEMDHYREPFLNPVDREPLWRFPNELPIAGEPANIVALVEEYMDWLHQSPVPKLLFWGTPGVLIPPAEAARLAKSLPNCKAVDIGPGLNLLQEDNPDLIGSEIARWLSTLEISGGSGGSGGGGSGGMVFTLEDFVGDWEQTAAYNLDQVLEQGGVSSLLQNLAVSVTPIQRIVRSGENALKIDIHVIIPYEGLSADQMAQIEEVFKVVYPVDDHHFKVILPYGTLVIDGVTPNMLNYFGRPYEGIAVFDGKKITVTGTLWNGNKIIDERLITPDGSMLFRVTINS

SEQ ID NO: 3237 - protein, 448 aa, Synthetic construct
MFHYVDVGPRDGTPVLFLHGNPTSSYVWRNIIPHVAPTHRCIAPDLIGMGKSDKPDLGYFFDDHVRFMDAFIEALGLEEVVLVIHDWGSALGFHWAKRNPERVKGIAFMEFIRPIPTWDEWPEFAREMFQAFRTTDVGRKLIIDQNVFIEGTLPMGVVRPLTEVEMDHYREPFLNPEDREPLWRFPNELPIAGEPANIVALVEEYMDWLHQSPVPKLLFWGTPGVLIPPAEAARLAKSLPNCKAVDIGPGLNLLQEDNPDLIGSEIARWLSTLEISGGSGGSGGGGSGGMVFTLEDFVGDWEQTAAYNLDQVLEQGGVSSLLQNLAVSVTPIQRIVRSGENALKIDIHVIIPYEGLSADQMAQIEEVFKVVYPVDDHHFKVILPYGTLVIDGVTPNMLNYFGRPYEGIAVFDGKKITVTGTLWNGNKIIDERLITPDGSMLFRVTINS

SEQ ID NO: 3238 - protein, 448 aa, Synthetic construct
MFHYVDVGPRDGTPVLFLHGNPTSSYVWRNIIPHVAPTHRCIAPDLIGMGKSDKPDLGYFFDDHVRFMDAFIEALGLEEVVLVIHDWGSALGFHWAKRNPERVKGIAFMEFIRPIPTWDEWPEFAREMFQAFRTTDVGRKLIIDQNVFIEGTLPMGVVRPLTEVEMDHYREPFLNPQDREPLWRFPNELPIAGEPANIVALVEEYMDWLHQSPVPKLLFWGTPGVLIPPAEAARLAKSLPNCKAVDIGPGLNLLQEDNPDLIGSEIARWLSTLEISGGSGGSGGGGSGGMVFTLEDFVGDWEQTAAYNLDQVLEQGGVSSLLQNLAVSVTPIQRIVRSGENALKIDIHVIIPYEGLSADQMAQIEEVFKVVYPVDDHHFKVILPYGTLVIDGVTPNMLNYFGRPYEGIAVFDGKKITVTGTLWNGNKIIDERLITPDGSMLFRVTINS

SEQ ID NO: 3239 - protein, 448 aa, Synthetic construct
MFHYVDVGPRDGTPVLFLHGNPTSSYVWRNIIPHVAPTHRCIAPDLIGMGKSDKPDLGYFFDDHVRFMDAFIEALGLEEVVLVIHDWGSALGFHWAKRNPERVKGIAFMEFIRPIPTWDEWPEFAREMFQAFRTTDVGRKLIIDQNVFIEGTLPMGVVRPLTEVEMDHYREPFLNPVDREPLWRFANELPIAGEPANIVALVEEYMDWLHQSPVPKLLFWGTPGVLIPPAEAARLAKSLPNCKAVDIGPGLNLLQEDNPDLIGSEIARWLSTLEISGGSGGSGGGGSGGMVFTLEDFVGDWEQTAAYNLDQVLEQGGVSSLLQNLAVSVTPIQRIVRSGENALKIDIHVIIPYEGLSADQMAQIEEVFKVVYPVDDHHFKVILPYGTLVIDGVTPNMLNYFGRPYEGIAVFDGKKITVTGTLWNGNKIIDERLITPDGSMLFRVTINS

SEQ ID NO: 3240 - protein, 448 aa, Synthetic construct
MFHYVDVGPRDGTPVLFLHGNPTSSYVWRNIIPHVAPTHRCIAPDLIGMGKSDKPDLGYFFDDHVRFMDAFIEALGLEEVVLVIHDWGSALGFHWAKRNPERVKGIAFMEFIRPIPTWDEWPEFAREMFQAFRTTDVGRKLIIDQNVFIEGTLPMGVVRPLTEVEMDHYREPFLNPVDREPLWRFVNELPIAGEPANIVALVEEYMDWLHQSPVPKLLFWGTPGVLIPPAEAARLAKSLPNCKAVDIGPGLNLLQEDNPDLIGSEIARWLSTLEISGGSGGSGGGGSGGMVFTLEDFVGDWEQTAAYNLDQVLEQGGVSSLLQNLAVSVTPIQRIVRSGENALKIDIHVIIPYEGLSADQMAQIEEVFKVVYPVDDHHFKVILPYGTLVIDGVTPNMLNYFGRPYEGIAVFDGKKITVTGTLWNGNKIIDERLITPDGSMLFRVTINS

SEQ ID NO: 3241 - protein, 448 aa, Synthetic construct
MFHYVDVGPRDGTPVLFLHGNPTSSYVWRNIIPHVAPTHRCIAPDLIGMGKSDKPDLGYFFDDHVRFMDAFIEALGLEEVVLVIHDWGSALGFHWAKRNPERVKGIAFMEFIRPIPTWDEWPEFAREMFQAFRTTDVGRKLIIDQNVFIEGTLPMGVVRPLTEVEMDHYREPFLNPVDREPLWRFPNELPIAGEPANIVALVEEYMDWLHQSPVPKLLFWGTPGVLIPPAEAARLAKALPNCKAVDIGPGLNLLQEDNPDLIGSEIARWLSTLEISGGSGGSGGGGSGGMVFTLEDFVGDWEQTAAYNLDQVLEQGGVSSLLQNLAVSVTPIQRIVRSGENALKIDIHVIIPYEGLSADQMAQIEEVFKVVYPVDDHHFKVILPYGTLVIDGVTPNMLNYFGRPYEGIAVFDGKKITVTGTLWNGNKIIDERLITPDGSMLFRVTINS

SEQ ID NO: 3242 - protein, 448 aa, Synthetic construct
MFHYVDVGPRDGTPVLFLHGNPTSSYVWRNIIPHVAPTHRCIAPDLIGMGKSDKPDLGYFFDDHVRFMDAFIEALGLEEVVLVIHDWGSALGFHWAKRNPERVKGIAFMEFIRPIPTWDEWPEFAREMFQAFRTTDVGRKLIIDQNVFIEGTLPMGVVRPLTEVEMDHYREPFLNPVDREPLWRFPNELPIAGEPANIVALVEEYMDWLHQSPVPKLLFWGTPGVLIPPAEAARLAKSLPNCKAVDIGPGLNILQEDNPDLIGSEIARWLSTLEISGGSGGSGGGGSGGMVFTLEDFVGDWEQTAAYNLDQVLEQGGVSSLLQNLAVSVTPIQRIVRSGENALKIDIHVIIPYEGLSADQMAQIEEVFKVVYPVDDHHFKVILPYGTLVIDGVTPNMLNYFGRPYEGIAVFDGKKITVTGTLWNGNKIIDERLITPDGSMLFRVTINS

SEQ ID NO: 3243 - protein, 448 aa, Synthetic construct
MFHYVDVGPRDGTPVLFLHGNPTSSYVWRNIIPHVAPTHRCIAPDLIGMGKSDKPDLGYFFDDHVRFMDAFIEALGLEEVVLVIHDWGSALGFHWAKRNPERVKGIAFMEFIRPIPTWDEWPEFARETFQQFRTEDVGRKLIIDQNVFIEGTLPMGVVRPLTEVEMDHYREPFLNPVDREPLWRFPNELPIAGEPANIVALVEEYMDWLHQSPVPKLLFWGTPGVLIPPAEAARLAKSLPNCKAVDIGPGLNLLQEDNPDLIGSEIARWLSTLEISGGSGGSGGGGSGGMVFTLEDFVGDWEQTAAYNLDQVLEQGGVSSLLQNLAVSVTPIQRIVRSGENALKIDIHVIIPYEGLSADQMAQIEEVFKVVYPVDDHHFKVILPYGTLVIDGVTPNMLNYFGRPYEGIAVFDGKKITVTGTLWNGNKIIDERLITPDGSMLFRVTINS

SEQ ID NO: 3244 - protein, 448 aa, Synthetic construct
MFHYVDVGPRDGTPVLFLHGNPTSSYVWRNIIPHVAPTHRCIAPDLIGMGKSDKPDLGYFFDDHVRFMDAFIEALGLEEVVLVIHDWGSALGFHWAKRNPERVKGIAFMEFIRPIPTWDEWPEFARETFQQFRTTDVGRKLIIDQNVMIEGTLPMGVVRPLTEVEMDHYREPFLNPVDREPLWRFPNELPIAGEPANIVALVEEYMDWLHQSPVPKLLFWGTPGVLIPPAEAARLAKSLPNCKAVDIGPGLNLLQEDNPDLIGSEIARWLSTLEISGGSGGSGGGGSGGMVFTLEDFVGDWEQTAAYNLDQVLEQGGVSSLLQNLAVSVTPIQRIVRSGENALKIDIHVIIPYEGLSADQMAQIEEVFKVVYPVDDHHFKVILPYGTLVIDGVTPNMLNYFGRPYEGIAVFDGKKITVTGTLWNGNKIIDERLITPDGSMLFRVTINS

SEQ ID NO: 3245 - protein, 448 aa, Synthetic construct
MFHYVDVGPRDGTPVLFLHGNPTSSYVWRNIIPHVAPTHRCIAPDLIGMGKSDKPDLGYFFDDHVRFMDAFIEALGLEEVVLVIHDWGSALGFHWAKRNPERVKGIAFMEFIRPIPTWDEWPEFARETFQQFRTTDVGRKLIIDQNVFIEGTLPMGVVRPLTEVEMDHYREPFLNPEDREPLWRFPNELPIAGEPANIVALVEEYMDWLHQSPVPKLLFWGTPGVLIPPAEAARLAKSLPNCKAVDIGPGLNLLQEDNPDLIGSEIARWLSTLEISGGSGGSGGGGSGGMVFTLEDFVGDWEQTAAYNLDQVLEQGGVSSLLQNLAVSVTPIQRIVRSGENALKIDIHVIIPYEGLSADQMAQIEEVFKVVYPVDDHHFKVILPYGTLVIDGVTPNMLNYFGRPYEGIAVFDGKKITVTGTLWNGNKIIDERLITPDGSMLFRVTINS

SEQ ID NO: 3246 - protein, 448 aa, Synthetic construct
MFHYVDVGPRDGTPVLFLHGNPTSSYVWRNIIPHVAPTHRCIAPDLIGMGKSDKPDLGYFFDDHVRFMDAFIEALGLEEVVLVIHDWGSALGFHWAKRNPERVKGIAFMEFIRPIPTWDEWPEFARETFQQFRTTDVGRKLIIDQNVFIEGTLPMGVVRPLTEVEMDHYREPFLNPQDREPLWRFPNELPIAGEPANIVALVEEYMDWLHQSPVPKLLFWGTPGVLIPPAEAARLAKSLPNCKAVDIGPGLNLLQEDNPDLIGSEIARWLSTLEISGGSGGSGGGGSGGMVFTLEDFVGDWEQTAAYNLDQVLEQGGVSSLLQNLAVSVTPIQRIVRSGENALKIDIHVIIPYEGLSADQMAQIEEVFKVVYPVDDHHFKVILPYGTLVIDGVTPNMLNYFGRPYEGIAVFDGKKITVTGTLWNGNKIIDERLITPDGSMLFRVTINS

SEQ ID NO: 3247 - protein, 448 aa, Synthetic construct
MFHYVDVGPRDGTPVLFLHGNPTSSYVWRNIIPHVAPTHRCIAPDLIGMGKSDKPDLGYFFDDHVRFMDAFIEALGLEEVVLVIHDWGSALGFHWAKRNPERVKGIAFMEFIRPIPTWDEWPEFARETFQQFRTTDVGRKLIIDQNVFIEGTLPMGVVRPLTEVEMDHYREPFLNPVDREPLWRFANELPIAGEPANIVALVEEYMDWLHQSPVPKLLFWGTPGVLIPPAEAARLAKSLPNCKAVDIGPGLNLLQEDNPDLIGSEIARWLSTLEISGGSGGSGGGGSGGMVFTLEDFVGDWEQTAAYNLDQVLEQGGVSSLLQNLAVSVTPIQRIVRSGENALKIDIHVIIPYEGLSADQMAQIEEVFKVVYPVDDHHFKVILPYGTLVIDGVTPNMLNYFGRPYEGIAVFDGKKITVTGTLWNGNKIIDERLITPDGSMLFRVTINS

SEQ ID NO: 3248 - protein, 448 aa, Synthetic construct
MFHYVDVGPRDGTPVLFLHGNPTSSYVWRNIIPHVAPTHRCIAPDLIGMGKSDKPDLGYFFDDHVRFMDAFIEALGLEEVVLVIHDWGSALGFHWAKRNPERVKGIAFMEFIRPIPTWDEWPEFARETFQQFRTTDVGRKLIIDQNVFIEGTLPMGVVRPLTEVEMDHYREPFLNPVDREPLWRFVNELPIAGEPANIVALVEEYMDWLHQSPVPKLLFWGTPGVLIPPAEAARLAKSLPNCKAVDIGPGLNLLQEDNPDLIGSEIARWLSTLEISGGSGGSGGGGSGGMVFTLEDFVGDWEQTAAYNLDQVLEQGGVSSLLQNLAVSVTPIQRIVRSGENALKIDIHVIIPYEGLSADQMAQIEEVFKVVYPVDDHHFKVILPYGTLVIDGVTPNMLNYFGRPYEGIAVFDGKKITVTGTLWNGNKIIDERLITPDGSMLFRVTINS

SEQ ID NO: 3249 - protein, 448 aa, Synthetic construct
MFHYVDVGPRDGTPVLFLHGNPTSSYVWRNIIPHVAPTHRCIAPDLIGMGKSDKPDLGYFFDDHVRFMDAFIEALGLEEVVLVIHDWGSALGFHWAKRNPERVKGIAFMEFIRPIPTWDEWPEFARETFQQFRTTDVGRKLIIDQNVFIEGTLPMGVVRPLTEVEMDHYREPFLNPVDREPLWRFPNELPIAGEPANIVALVEEYMDWLHQSPVPKLLFWGTPGVLIPPAEAARLAKALPNCKAVDIGPGLNLLQEDNPDLIGSEIARWLSTLEISGGSGGSGGGGSGGMVFTLEDFVGDWEQTAAYNLDQVLEQGGVSSLLQNLAVSVTPIQRIVRSGENALKIDIHVIIPYEGLSADQMAQIEEVFKVVYPVDDHHFKVILPYGTLVIDGVTPNMLNYFGRPYEGIAVFDGKKITVTGTLWNGNKIIDERLITPDGSMLFRVTINS

SEQ ID NO: 3250 - protein, 448 aa, Synthetic construct
MFHYVDVGPRDGTPVLFLHGNPTSSYVWRNIIPHVAPTHRCIAPDLIGMGKSDKPDLGYFFDDHVRFMDAFIEALGLEEVVLVIHDWGSALGFHWAKRNPERVKGIAFMEFIRPIPTWDEWPEFARETFQQFRTTDVGRKLIIDQNVFIEGTLPMGVVRPLTEVEMDHYREPFLNPVDREPLWRFPNELPIAGEPANIVALVEEYMDWLHQSPVPKLLFWGTPGVLIPPAEAARLAKSLPNCKAVDIGPGLNILQEDNPDLIGSEIARWLSTLEISGGSGGSGGGGSGGMVFTLEDFVGDWEQTAAYNLDQVLEQGGVSSLLQNLAVSVTPIQRIVRSGENALKIDIHVIIPYEGLSADQMAQIEEVFKVVYPVDDHHFKVILPYGTLVIDGVTPNMLNYFGRPYEGIAVFDGKKITVTGTLWNGNKIIDERLITPDGSMLFRVTINS

SEQ ID NO: 3251 - protein, 448 aa, Synthetic construct
MFHYVDVGPRDGTPVLFLHGNPTSSYVWRNIIPHVAPTHRCIAPDLIGMGKSDKPDLGYFFDDHVRFMDAFIEALGLEEVVLVIHDWGSALGFHWAKRNPERVKGIAFMEFIRPIPTWDEWPEFARETFQAFRTEDVGRKLIIDQNVMIEGTLPMGVVRPLTEVEMDHYREPFLNPVDREPLWRFPNELPIAGEPANIVALVEEYMDWLHQSPVPKLLFWGTPGVLIPPAEAARLAKSLPNCKAVDIGPGLNLLQEDNPDLIGSEIARWLSTLEISGGSGGSGGGGSGGMVFTLEDFVGDWEQTAAYNLDQVLEQGGVSSLLQNLAVSVTPIQRIVRSGENALKIDIHVIIPYEGLSADQMAQIEEVFKVVYPVDDHHFKVILPYGTLVIDGVTPNMLNYFGRPYEGIAVFDGKKITVTGTLWNGNKIIDERLITPDGSMLFRVTINS

SEQ ID NO: 3252 - protein, 448 aa, Synthetic construct
MFHYVDVGPRDGTPVLFLHGNPTSSYVWRNIIPHVAPTHRCIAPDLIGMGKSDKPDLGYFFDDHVRFMDAFIEALGLEEVVLVIHDWGSALGFHWAKRNPERVKGIAFMEFIRPIPTWDEWPEFARETFQAFRTEDVGRKLIIDQNVFIEGTLPMGVVRPLTEVEMDHYREPFLNPEDREPLWRFPNELPIAGEPANIVALVEEYMDWLHQSPVPKLLFWGTPGVLIPPAEAARLAKSLPNCKAVDIGPGLNLLQEDNPDLIGSEIARWLSTLEISGGSGGSGGGGSGGMVFTLEDFVGDWEQTAAYNLDQVLEQGGVSSLLQNLAVSVTPIQRIVRSGENALKIDIHVIIPYEGLSADQMAQIEEVFKVVYPVDDHHFKVILPYGTLVIDGVTPNMLNYFGRPYEGIAVFDGKKITVTGTLWNGNKIIDERLITPDGSMLFRVTINS

SEQ ID NO: 3253 - protein, 448 aa, Synthetic construct
MFHYVDVGPRDGTPVLFLHGNPTSSYVWRNIIPHVAPTHRCIAPDLIGMGKSDKPDLGYFFDDHVRFMDAFIEALGLEEVVLVIHDWGSALGFHWAKRNPERVKGIAFMEFIRPIPTWDEWPEFARETFQAFRTEDVGRKLIIDQNVFIEGTLPMGVVRPLTEVEMDHYREPFLNPQDREPLWRFPNELPIAGEPANIVALVEEYMDWLHQSPVPKLLFWGTPGVLIPPAEAARLAKSLPNCKAVDIGPGLNLLQEDNPDLIGSEIARWLSTLEISGGSGGSGGGGSGGMVFTLEDFVGDWEQTAAYNLDQVLEQGGVSSLLQNLAVSVTPIQRIVRSGENALKIDIHVIIPYEGLSADQMAQIEEVFKVVYPVDDHHFKVILPYGTLVIDGVTPNMLNYFGRPYEGIAVFDGKKITVTGTLWNGNKIIDERLITPDGSMLFRVTINS

SEQ ID NO: 3254 - protein, 448 aa, Synthetic construct
MFHYVDVGPRDGTPVLFLHGNPTSSYVWRNIIPHVAPTHRCIAPDLIGMGKSDKPDLGYFFDDHVRFMDAFIEALGLEEVVLVIHDWGSALGFHWAKRNPERVKGIAFMEFIRPIPTWDEWPEFARETFQAFRTEDVGRKLIIDQNVFIEGTLPMGVVRPLTEVEMDHYREPFLNPVDREPLWRFANELPIAGEPANIVALVEEYMDWLHQSPVPKLLFWGTPGVLIPPAEAARLAKSLPNCKAVDIGPGLNLLQEDNPDLIGSEIARWLSTLEISGGSGGSGGGGSGGMVFTLEDFVGDWEQTAAYNLDQVLEQGGVSSLLQNLAVSVTPIQRIVRSGENALKIDIHVIIPYEGLSADQMAQIEEVFKVVYPVDDHHFKVILPYGTLVIDGVTPNMLNYFGRPYEGIAVFDGKKITVTGTLWNGNKIIDERLITPDGSMLFRVTINS

SEQ ID NO: 3255 - protein, 448 aa, Synthetic construct
MFHYVDVGPRDGTPVLFLHGNPTSSYVWRNIIPHVAPTHRCIAPDLIGMGKSDKPDLGYFFDDHVRFMDAFIEALGLEEVVLVIHDWGSALGFHWAKRNPERVKGIAFMEFIRPIPTWDEWPEFARETFQAFRTEDVGRKLIIDQNVFIEGTLPMGVVRPLTEVEMDHYREPFLNPVDREPLWRFVNELPIAGEPANIVALVEEYMDWLHQSPVPKLLFWGTPGVLIPPAEAARLAKSLPNCKAVDIGPGLNLLQEDNPDLIGSEIARWLSTLEISGGSGGSGGGGSGGMVFTLEDFVGDWEQTAAYNLDQVLEQGGVSSLLQNLAVSVTPIQRIVRSGENALKIDIHVIIPYEGLSADQMAQIEEVFKVVYPVDDHHFKVILPYGTLVIDGVTPNMLNYFGRPYEGIAVFDGKKITVTGTLWNGNKIIDERLITPDGSMLFRVTINS

SEQ ID NO: 3256 - protein, 448 aa, Synthetic construct
MFHYVDVGPRDGTPVLFLHGNPTSSYVWRNIIPHVAPTHRCIAPDLIGMGKSDKPDLGYFFDDHVRFMDAFIEALGLEEVVLVIHDWGSALGFHWAKRNPERVKGIAFMEFIRPIPTWDEWPEFARETFQAFRTEDVGRKLIIDQNVFIEGTLPMGVVRPLTEVEMDHYREPFLNPVDREPLWRFPNELPIAGEPANIVALVEEYMDWLHQSPVPKLLFWGTPGVLIPPAEAARLAKALPNCKAVDIGPGLNLLQEDNPDLIGSEIARWLSTLEISGGSGGSGGGGSGGMVFTLEDFVGDWEQTAAYNLDQVLEQGGVSSLLQNLAVSVTPIQRIVRSGENALKIDIHVIIPYEGLSADQMAQIEEVFKVVYPVDDHHFKVILPYGTLVIDGVTPNMLNYFGRPYEGIAVFDGKKITVTGTLWNGNKIIDERLITPDGSMLFRVTINS

SEQ ID NO: 3257 - protein, 448 aa, Synthetic construct
MFHYVDVGPRDGTPVLFLHGNPTSSYVWRNIIPHVAPTHRCIAPDLIGMGKSDKPDLGYFFDDHVRFMDAFIEALGLEEVVLVIHDWGSALGFHWAKRNPERVKGIAFMEFIRPIPTWDEWPEFARETFQAFRTEDVGRKLIIDQNVFIEGTLPMGVVRPLTEVEMDHYREPFLNPVDREPLWRFPNELPIAGEPANIVALVEEYMDWLHQSPVPKLLFWGTPGVLIPPAEAARLAKSLPNCKAVDIGPGLNILQEDNPDLIGSEIARWLSTLEISGGSGGSGGGGSGGMVFTLEDFVGDWEQTAAYNLDQVLEQGGVSSLLQNLAVSVTPIQRIVRSGENALKIDIHVIIPYEGLSADQMAQIEEVFKVVYPVDDHHFKVILPYGTLVIDGVTPNMLNYFGRPYEGIAVFDGKKITVTGTLWNGNKIIDERLITPDGSMLFRVTINS

SEQ ID NO: 3258 - protein, 448 aa, Synthetic construct
MFHYVDVGPRDGTPVLFLHGNPTSSYVWRNIIPHVAPTHRCIAPDLIGMGKSDKPDLGYFFDDHVRFMDAFIEALGLEEVVLVIHDWGSALGFHWAKRNPERVKGIAFMEFIRPIPTWDEWPEFARETFQAFRTTDVGRKLIIDQNVMIEGTLPMGVVRPLTEVEMDHYREPFLNPEDREPLWRFPNELPIAGEPANIVALVEEYMDWLHQSPVPKLLFWGTPGVLIPPAEAARLAKSLPNCKAVDIGPGLNLLQEDNPDLIGSEIARWLSTLEISGGSGGSGGGGSGGMVFTLEDFVGDWEQTAAYNLDQVLEQGGVSSLLQNLAVSVTPIQRIVRSGENALKIDIHVIIPYEGLSADQMAQIEEVFKVVYPVDDHHFKVILPYGTLVIDGVTPNMLNYFGRPYEGIAVFDGKKITVTGTLWNGNKIIDERLITPDGSMLFRVTINS

SEQ ID NO: 3259 - protein, 448 aa, Synthetic construct
MFHYVDVGPRDGTPVLFLHGNPTSSYVWRNIIPHVAPTHRCIAPDLIGMGKSDKPDLGYFFDDHVRFMDAFIEALGLEEVVLVIHDWGSALGFHWAKRNPERVKGIAFMEFIRPIPTWDEWPEFARETFQAFRTTDVGRKLIIDQNVMIEGTLPMGVVRPLTEVEMDHYREPFLNPQDREPLWRFPNELPIAGEPANIVALVEEYMDWLHQSPVPKLLFWGTPGVLIPPAEAARLAKSLPNCKAVDIGPGLNLLQEDNPDLIGSEIARWLSTLEISGGSGGSGGGGSGGMVFTLEDFVGDWEQTAAYNLDQVLEQGGVSSLLQNLAVSVTPIQRIVRSGENALKIDIHVIIPYEGLSADQMAQIEEVFKVVYPVDDHHFKVILPYGTLVIDGVTPNMLNYFGRPYEGIAVFDGKKITVTGTLWNGNKIIDERLITPDGSMLFRVTINS

SEQ ID NO: 3260 - protein, 448 aa, Synthetic construct
MFHYVDVGPRDGTPVLFLHGNPTSSYVWRNIIPHVAPTHRCIAPDLIGMGKSDKPDLGYFFDDHVRFMDAFIEALGLEEVVLVIHDWGSALGFHWAKRNPERVKGIAFMEFIRPIPTWDEWPEFARETFQAFRTTDVGRKLIIDQNVMIEGTLPMGVVRPLTEVEMDHYREPFLNPVDREPLWRFANELPIAGEPANIVALVEEYMDWLHQSPVPKLLFWGTPGVLIPPAEAARLAKSLPNCKAVDIGPGLNLLQEDNPDLIGSEIARWLSTLEISGGSGGSGGGGSGGMVFTLEDFVGDWEQTAAYNLDQVLEQGGVSSLLQNLAVSVTPIQRIVRSGENALKIDIHVIIPYEGLSADQMAQIEEVFKVVYPVDDHHFKVILPYGTLVIDGVTPNMLNYFGRPYEGIAVFDGKKITVTGTLWNGNKIIDERLITPDGSMLFRVTINS

SEQ ID NO: 3261 - protein, 448 aa, Synthetic construct
MFHYVDVGPRDGTPVLFLHGNPTSSYVWRNIIPHVAPTHRCIAPDLIGMGKSDKPDLGYFFDDHVRFMDAFIEALGLEEVVLVIHDWGSALGFHWAKRNPERVKGIAFMEFIRPIPTWDEWPEFARETFQAFRTTDVGRKLIIDQNVMIEGTLPMGVVRPLTEVEMDHYREPFLNPVDREPLWRFVNELPIAGEPANIVALVEEYMDWLHQSPVPKLLFWGTPGVLIPPAEAARLAKSLPNCKAVDIGPGLNLLQEDNPDLIGSEIARWLSTLEISGGSGGSGGGGSGGMVFTLEDFVGDWEQTAAYNLDQVLEQGGVSSLLQNLAVSVTPIQRIVRSGENALKIDIHVIIPYEGLSADQMAQIEEVFKVVYPVDDHHFKVILPYGTLVIDGVTPNMLNYFGRPYEGIAVFDGKKITVTGTLWNGNKIIDERLITPDGSMLFRVTINS

SEQ ID NO: 3262 - protein, 448 aa, Synthetic construct
MFHYVDVGPRDGTPVLFLHGNPTSSYVWRNIIPHVAPTHRCIAPDLIGMGKSDKPDLGYFFDDHVRFMDAFIEALGLEEVVLVIHDWGSALGFHWAKRNPERVKGIAFMEFIRPIPTWDEWPEFARETFQAFRTTDVGRKLIIDQNVMIEGTLPMGVVRPLTEVEMDHYREPFLNPVDREPLWRFPNELPIAGEPANIVALVEEYMDWLHQSPVPKLLFWGTPGVLIPPAEAARLAKALPNCKAVDIGPGLNLLQEDNPDLIGSEIARWLSTLEISGGSGGSGGGGSGGMVFTLEDFVGDWEQTAAYNLDQVLEQGGVSSLLQNLAVSVTPIQRIVRSGENALKIDIHVIIPYEGLSADQMAQIEEVFKVVYPVDDHHFKVILPYGTLVIDGVTPNMLNYFGRPYEGIAVFDGKKITVTGTLWNGNKIIDERLITPDGSMLFRVTINS

SEQ ID NO: 3263 - protein, 448 aa, Synthetic construct
MFHYVDVGPRDGTPVLFLHGNPTSSYVWRNIIPHVAPTHRCIAPDLIGMGKSDKPDLGYFFDDHVRFMDAFIEALGLEEVVLVIHDWGSALGFHWAKRNPERVKGIAFMEFIRPIPTWDEWPEFARETFQAFRTTDVGRKLIIDQNVMIEGTLPMGVVRPLTEVEMDHYREPFLNPVDREPLWRFPNELPIAGEPANIVALVEEYMDWLHQSPVPKLLFWGTPGVLIPPAEAARLAKSLPNCKAVDIGPGLNILQEDNPDLIGSEIARWLSTLEISGGSGGSGGGGSGGMVFTLEDFVGDWEQTAAYNLDQVLEQGGVSSLLQNLAVSVTPIQRIVRSGENALKIDIHVIIPYEGLSADQMAQIEEVFKVVYPVDDHHFKVILPYGTLVIDGVTPNMLNYFGRPYEGIAVFDGKKITVTGTLWNGNKIIDERLITPDGSMLFRVTINS

SEQ ID NO: 3264 - protein, 448 aa, Synthetic construct
MFHYVDVGPRDGTPVLFLHGNPTSSYVWRNIIPHVAPTHRCIAPDLIGMGKSDKPDLGYFFDDHVRFMDAFIEALGLEEVVLVIHDWGSALGFHWAKRNPERVKGIAFMEFIRPIPTWDEWPEFARETFQAFRTTDVGRKLIIDQNVFIEGTLPMGVVRPLTEVEMDHYREPFLNPEDREPLWRFANELPIAGEPANIVALVEEYMDWLHQSPVPKLLFWGTPGVLIPPAEAARLAKSLPNCKAVDIGPGLNLLQEDNPDLIGSEIARWLSTLEISGGSGGSGGGGSGGMVFTLEDFVGDWEQTAAYNLDQVLEQGGVSSLLQNLAVSVTPIQRIVRSGENALKIDIHVIIPYEGLSADQMAQIEEVFKVVYPVDDHHFKVILPYGTLVIDGVTPNMLNYFGRPYEGIAVFDGKKITVTGTLWNGNKIIDERLITPDGSMLFRVTINS

SEQ ID NO: 3265 - protein, 448 aa, Synthetic construct
MFHYVDVGPRDGTPVLFLHGNPTSSYVWRNIIPHVAPTHRCIAPDLIGMGKSDKPDLGYFFDDHVRFMDAFIEALGLEEVVLVIHDWGSALGFHWAKRNPERVKGIAFMEFIRPIPTWDEWPEFARETFQAFRTTDVGRKLIIDQNVFIEGTLPMGVVRPLTEVEMDHYREPFLNPEDREPLWRFVNELPIAGEPANIVALVEEYMDWLHQSPVPKLLFWGTPGVLIPPAEAARLAKSLPNCKAVDIGPGLNLLQEDNPDLIGSEIARWLSTLEISGGSGGSGGGGSGGMVFTLEDFVGDWEQTAAYNLDQVLEQGGVSSLLQNLAVSVTPIQRIVRSGENALKIDIHVIIPYEGLSADQMAQIEEVFKVVYPVDDHHFKVILPYGTLVIDGVTPNMLNYFGRPYEGIAVFDGKKITVTGTLWNGNKIIDERLITPDGSMLFRVTINS

SEQ ID NO: 3266 - protein, 448 aa, Synthetic construct
MFHYVDVGPRDGTPVLFLHGNPTSSYVWRNIIPHVAPTHRCIAPDLIGMGKSDKPDLGYFFDDHVRFMDAFIEALGLEEVVLVIHDWGSALGFHWAKRNPERVKGIAFMEFIRPIPTWDEWPEFARETFQAFRTTDVGRKLIIDQNVFIEGTLPMGVVRPLTEVEMDHYREPFLNPEDREPLWRFPNELPIAGEPANIVALVEEYMDWLHQSPVPKLLFWGTPGVLIPPAEAARLAKALPNCKAVDIGPGLNLLQEDNPDLIGSEIARWLSTLEISGGSGGSGGGGSGGMVFTLEDFVGDWEQTAAYNLDQVLEQGGVSSLLQNLAVSVTPIQRIVRSGENALKIDIHVIIPYEGLSADQMAQIEEVFKVVYPVDDHHFKVILPYGTLVIDGVTPNMLNYFGRPYEGIAVFDGKKITVTGTLWNGNKIIDERLITPDGSMLFRVTINS

SEQ ID NO: 3267 - protein, 448 aa, Synthetic construct
MFHYVDVGPRDGTPVLFLHGNPTSSYVWRNIIPHVAPTHRCIAPDLIGMGKSDKPDLGYFFDDHVRFMDAFIEALGLEEVVLVIHDWGSALGFHWAKRNPERVKGIAFMEFIRPIPTWDEWPEFARETFQAFRTTDVGRKLIIDQNVFIEGTLPMGVVRPLTEVEMDHYREPFLNPEDREPLWRFPNELPIAGEPANIVALVEEYMDWLHQSPVPKLLFWGTPGVLIPPAEAARLAKSLPNCKAVDIGPGLNILQEDNPDLIGSEIARWLSTLEISGGSGGSGGGGSGGMVFTLEDFVGDWEQTAAYNLDQVLEQGGVSSLLQNLAVSVTPIQRIVRSGENALKIDIHVIIPYEGLSADQMAQIEEVFKVVYPVDDHHFKVILPYGTLVIDGVTPNMLNYFGRPYEGIAVFDGKKITVTGTLWNGNKIIDERLITPDGSMLFRVTINS

SEQ ID NO: 3268 - protein, 448 aa, Synthetic construct
MFHYVDVGPRDGTPVLFLHGNPTSSYVWRNIIPHVAPTHRCIAPDLIGMGKSDKPDLGYFFDDHVRFMDAFIEALGLEEVVLVIHDWGSALGFHWAKRNPERVKGIAFMEFIRPIPTWDEWPEFARETFQAFRTTDVGRKLIIDQNVFIEGTLPMGVVRPLTEVEMDHYREPFLNPQDREPLWRFANELPIAGEPANIVALVEEYMDWLHQSPVPKLLFWGTPGVLIPPAEAARLAKSLPNCKAVDIGPGLNLLQEDNPDLIGSEIARWLSTLEISGGSGGSGGGGSGGMVFTLEDFVGDWEQTAAYNLDQVLEQGGVSSLLQNLAVSVTPIQRIVRSGENALKIDIHVIIPYEGLSADQMAQIEEVFKVVYPVDDHHFKVILPYGTLVIDGVTPNMLNYFGRPYEGIAVFDGKKITVTGTLWNGNKIIDERLITPDGSMLFRVTINS

SEQ ID NO: 3269 - protein, 448 aa, Synthetic construct
MFHYVDVGPRDGTPVLFLHGNPTSSYVWRNIIPHVAPTHRCIAPDLIGMGKSDKPDLGYFFDDHVRFMDAFIEALGLEEVVLVIHDWGSALGFHWAKRNPERVKGIAFMEFIRPIPTWDEWPEFARETFQAFRTTDVGRKLIIDQNVFIEGTLPMGVVRPLTEVEMDHYREPFLNPQDREPLWRFVNELPIAGEPANIVALVEEYMDWLHQSPVPKLLFWGTPGVLIPPAEAARLAKSLPNCKAVDIGPGLNLLQEDNPDLIGSEIARWLSTLEISGGSGGSGGGGSGGMVFTLEDFVGDWEQTAAYNLDQVLEQGGVSSLLQNLAVSVTPIQRIVRSGENALKIDIHVIIPYEGLSADQMAQIEEVFKVVYPVDDHHFKVILPYGTLVIDGVTPNMLNYFGRPYEGIAVFDGKKITVTGTLWNGNKIIDERLITPDGSMLFRVTINS

SEQ ID NO: 3270 - protein, 448 aa, Synthetic construct
MFHYVDVGPRDGTPVLFLHGNPTSSYVWRNIIPHVAPTHRCIAPDLIGMGKSDKPDLGYFFDDHVRFMDAFIEALGLEEVVLVIHDWGSALGFHWAKRNPERVKGIAFMEFIRPIPTWDEWPEFARETFQAFRTTDVGRKLIIDQNVFIEGTLPMGVVRPLTEVEMDHYREPFLNPQDREPLWRFPNELPIAGEPANIVALVEEYMDWLHQSPVPKLLFWGTPGVLIPPAEAARLAKALPNCKAVDIGPGLNLLQEDNPDLIGSEIARWLSTLEISGGSGGSGGGGSGGMVFTLEDFVGDWEQTAAYNLDQVLEQGGVSSLLQNLAVSVTPIQRIVRSGENALKIDIHVIIPYEGLSADQMAQIEEVFKVVYPVDDHHFKVILPYGTLVIDGVTPNMLNYFGRPYEGIAVFDGKKITVTGTLWNGNKIIDERLITPDGSMLFRVTINS

SEQ ID NO: 3271 - protein, 448 aa, Synthetic construct
MFHYVDVGPRDGTPVLFLHGNPTSSYVWRNIIPHVAPTHRCIAPDLIGMGKSDKPDLGYFFDDHVRFMDAFIEALGLEEVVLVIHDWGSALGFHWAKRNPERVKGIAFMEFIRPIPTWDEWPEFARETFQAFRTTDVGRKLIIDQNVFIEGTLPMGVVRPLTEVEMDHYREPFLNPQDREPLWRFPNELPIAGEPANIVALVEEYMDWLHQSPVPKLLFWGTPGVLIPPAEAARLAKSLPNCKAVDIGPGLNILQEDNPDLIGSEIARWLSTLEISGGSGGSGGGGSGGMVFTLEDFVGDWEQTAAYNLDQVLEQGGVSSLLQNLAVSVTPIQRIVRSGENALKIDIHVIIPYEGLSADQMAQIEEVFKVVYPVDDHHFKVILPYGTLVIDGVTPNMLNYFGRPYEGIAVFDGKKITVTGTLWNGNKIIDERLITPDGSMLFRVTINS

SEQ ID NO: 3272 - protein, 448 aa, Synthetic construct
MFHYVDVGPRDGTPVLFLHGNPTSSYVWRNIIPHVAPTHRCIAPDLIGMGKSDKPDLGYFFDDHVRFMDAFIEALGLEEVVLVIHDWGSALGFHWAKRNPERVKGIAFMEFIRPIPTWDEWPEFARETFQAFRTTDVGRKLIIDQNVFIEGTLPMGVVRPLTEVEMDHYREPFLNPVDREPLWRFANELPIAGEPANIVALVEEYMDWLHQSPVPKLLFWGTPGVLIPPAEAARLAKALPNCKAVDIGPGLNLLQEDNPDLIGSEIARWLSTLEISGGSGGSGGGGSGGMVFTLEDFVGDWEQTAAYNLDQVLEQGGVSSLLQNLAVSVTPIQRIVRSGENALKIDIHVIIPYEGLSADQMAQIEEVFKVVYPVDDHHFKVILPYGTLVIDGVTPNMLNYFGRPYEGIAVFDGKKITVTGTLWNGNKIIDERLITPDGSMLFRVTINS

SEQ ID NO: 3273 - protein, 448 aa, Synthetic construct
MFHYVDVGPRDGTPVLFLHGNPTSSYVWRNIIPHVAPTHRCIAPDLIGMGKSDKPDLGYFFDDHVRFMDAFIEALGLEEVVLVIHDWGSALGFHWAKRNPERVKGIAFMEFIRPIPTWDEWPEFARETFQAFRTTDVGRKLIIDQNVFIEGTLPMGVVRPLTEVEMDHYREPFLNPVDREPLWRFANELPIAGEPANIVALVEEYMDWLHQSPVPKLLFWGTPGVLIPPAEAARLAKSLPNCKAVDIGPGLNILQEDNPDLIGSEIARWLSTLEISGGSGGSGGGGSGGMVFTLEDFVGDWEQTAAYNLDQVLEQGGVSSLLQNLAVSVTPIQRIVRSGENALKIDIHVIIPYEGLSADQMAQIEEVFKVVYPVDDHHFKVILPYGTLVIDGVTPNMLNYFGRPYEGIAVFDGKKITVTGTLWNGNKIIDERLITPDGSMLFRVTINS

SEQ ID NO: 3274 - protein, 448 aa, Synthetic construct
MFHYVDVGPRDGTPVLFLHGNPTSSYVWRNIIPHVAPTHRCIAPDLIGMGKSDKPDLGYFFDDHVRFMDAFIEALGLEEVVLVIHDWGSALGFHWAKRNPERVKGIAFMEFIRPIPTWDEWPEFARETFQAFRTTDVGRKLIIDQNVFIEGTLPMGVVRPLTEVEMDHYREPFLNPVDREPLWRFVNELPIAGEPANIVALVEEYMDWLHQSPVPKLLFWGTPGVLIPPAEAARLAKALPNCKAVDIGPGLNLLQEDNPDLIGSEIARWLSTLEISGGSGGSGGGGSGGMVFTLEDFVGDWEQTAAYNLDQVLEQGGVSSLLQNLAVSVTPIQRIVRSGENALKIDIHVIIPYEGLSADQMAQIEEVFKVVYPVDDHHFKVILPYGTLVIDGVTPNMLNYFGRPYEGIAVFDGKKITVTGTLWNGNKIIDERLITPDGSMLFRVTINS

SEQ ID NO: 3275 - protein, 448 aa, Synthetic construct
MFHYVDVGPRDGTPVLFLHGNPTSSYVWRNIIPHVAPTHRCIAPDLIGMGKSDKPDLGYFFDDHVRFMDAFIEALGLEEVVLVIHDWGSALGFHWAKRNPERVKGIAFMEFIRPIPTWDEWPEFARETFQAFRTTDVGRKLIIDQNVFIEGTLPMGVVRPLTEVEMDHYREPFLNPVDREPLWRFVNELPIAGEPANIVALVEEYMDWLHQSPVPKLLFWGTPGVLIPPAEAARLAKSLPNCKAVDIGPGLNILQEDNPDLIGSEIARWLSTLEISGGSGGSGGGGSGGMVFTLEDFVGDWEQTAAYNLDQVLEQGGVSSLLQNLAVSVTPIQRIVRSGENALKIDIHVIIPYEGLSADQMAQIEEVFKVVYPVDDHHFKVILPYGTLVIDGVTPNMLNYFGRPYEGIAVFDGKKITVTGTLWNGNKIIDERLITPDGSMLFRVTINS

SEQ ID NO: 3276 - protein, 448 aa, Synthetic construct
MFHYVDVGPRDGTPVLFLHGNPTSSYVWRNIIPHVAPTHRCIAPDLIGMGKSDKPDLGYFFDDHVRFMDAFIEALGLEEVVLVIHDWGSALGFHWAKRNPERVKGIAFMEFIRPIPTWDEWPEFARETFQAFRTTDVGRKLIIDQNVFIEGTLPMGVVRPLTEVEMDHYREPFLNPVDREPLWRFPNELPIAGEPANIVALVEEYMDWLHQSPVPKLLFWGTPGVLIPPAEAARLAKALPNCKAVDIGPGLNILQEDNPDLIGSEIARWLSTLEISGGSGGSGGGGSGGMVFTLEDFVGDWEQTAAYNLDQVLEQGGVSSLLQNLAVSVTPIQRIVRSGENALKIDIHVIIPYEGLSADQMAQIEEVFKVVYPVDDHHFKVILPYGTLVIDGVTPNMLNYFGRPYEGIAVFDGKKITVTGTLWNGNKIIDERLITPDGSMLFRVTINS

SEQ ID NO: 3277 - protein, 448 aa, Synthetic construct
MFHYVDVGPRDGTPVLFLHGNPTSSYVWRNIIPHVAPTHRCIAPDLIGFGKSGKPPLGYFFDDHVRFMDAFIEALGLEEVVLVIHDWGSALGFHWAKRNPERVKGIAFMEFIRPIPTWDEWPEFARETFQAFRTTDVGRKLIIDQNVFIEGTLPMGVVRPLTEVEMDHYREPFLNPVDREPLWRFPNELPIAGEPANIVALVEEYMDWLHQSPVPKLLFWGTPGVLIPPAEAARLAKSLPNCKAVDIGPGLNLLQEDNPDLIGSEIARWLSTLEISGGSGGSGGGGSGGMVFTLEDFVGDWEQTAAYNLDQVLEQGGVSSLLQNLAVSVTPIQRIVRSGENALKIDIHVIIPYEGLSADQMAQIEEVFKVVYPVDDHHFKVILPYGTLVIDGVTPNMLNYFGRPYEGIAVFDGKKITVTGTLWNGNKIIDERLITPDGSMLFRVTINS

SEQ ID NO: 3278 - protein, 448 aa, Synthetic construct
MFHYVDVGPRDGTPVLFLHGNPTSSYVWRNIIPHVAPTHRCIAPDLIGMGKSGKPPIGYFFDDHVRFMDAFIEALGLEEVVLVIHDWGSALGFHWAKRNPERVKGIAFMEFIRPIPTWDEWPEFARETFQAFRTTDVGRKLIIDQNVFIEGTLPMGVVRPLTEVEMDHYREPFLNPVDREPLWRFPNELPIAGEPANIVALVEEYMDWLHQSPVPKLLFWGTPGVLIPPAEAARLAKSLPNCKAVDIGPGLNLLQEDNPDLIGSEIARWLSTLEISGGSGGSGGGGSGGMVFTLEDFVGDWEQTAAYNLDQVLEQGGVSSLLQNLAVSVTPIQRIVRSGENALKIDIHVIIPYEGLSADQMAQIEEVFKVVYPVDDHHFKVILPYGTLVIDGVTPNMLNYFGRPYEGIAVFDGKKITVTGTLWNGNKIIDERLITPDGSMLFRVTINS

SEQ ID NO: 3279 - protein, 448 aa, Synthetic construct
MFHYVDVGPRDGTPVLFLHGNPTSSYVWRNIIPHVAPTHRCIAPDLIGMGKSGKPPLGYFFDDHVRFMDAFIEALGLEEVVLVIHDWGSALGFHWAKRNPERVKGIAFMEFIRPIPTWDEWPEFAREMFQAFRTTDVGRKLIIDQNVFIEGTLPMGVVRPLTEVEMDHYREPFLNPVDREPLWRFPNELPIAGEPANIVALVEEYMDWLHQSPVPKLLFWGTPGVLIPPAEAARLAKSLPNCKAVDIGPGLNLLQEDNPDLIGSEIARWLSTLEISGGSGGSGGGGSGGMVFTLEDFVGDWEQTAAYNLDQVLEQGGVSSLLQNLAVSVTPIQRIVRSGENALKIDIHVIIPYEGLSADQMAQIEEVFKVVYPVDDHHFKVILPYGTLVIDGVTPNMLNYFGRPYEGIAVFDGKKITVTGTLWNGNKIIDERLITPDGSMLFRVTINS

SEQ ID NO: 3280 - protein, 448 aa, Synthetic construct
MFHYVDVGPRDGTPVLFLHGNPTSSYVWRNIIPHVAPTHRCIAPDLIGMGKSGKPPLGYFFDDHVRFMDAFIEALGLEEVVLVIHDWGSALGFHWAKRNPERVKGIAFMEFIRPIPTWDEWPEFARETFQAFRTTDVGRKLIIDQNVMIEGTLPMGVVRPLTEVEMDHYREPFLNPVDREPLWRFPNELPIAGEPANIVALVEEYMDWLHQSPVPKLLFWGTPGVLIPPAEAARLAKSLPNCKAVDIGPGLNLLQEDNPDLIGSEIARWLSTLEISGGSGGSGGGGSGGMVFTLEDFVGDWEQTAAYNLDQVLEQGGVSSLLQNLAVSVTPIQRIVRSGENALKIDIHVIIPYEGLSADQMAQIEEVFKVVYPVDDHHFKVILPYGTLVIDGVTPNMLNYFGRPYEGIAVFDGKKITVTGTLWNGNKIIDERLITPDGSMLFRVTINS

SEQ ID NO: 3281 - protein, 448 aa, Synthetic construct
MFHYVDVGPRDGTPVLFLHGNPTSSYVWRNIIPHVAPTHRCIAPDLIGMGKSGKPPLGYFFDDHVRFMDAFIEALGLEEVVLVIHDWGSALGFHWAKRNPERVKGIAFMEFIRPIPTWDEWPEFARETFQAFRTTDVGRKLIIDQNVFIEGTLPMGVVRPLTEVEMDHYREPFLNPEDREPLWRFPNELPIAGEPANIVALVEEYMDWLHQSPVPKLLFWGTPGVLIPPAEAARLAKSLPNCKAVDIGPGLNLLQEDNPDLIGSEIARWLSTLEISGGSGGSGGGGSGGMVFTLEDFVGDWEQTAAYNLDQVLEQGGVSSLLQNLAVSVTPIQRIVRSGENALKIDIHVIIPYEGLSADQMAQIEEVFKVVYPVDDHHFKVILPYGTLVIDGVTPNMLNYFGRPYEGIAVFDGKKITVTGTLWNGNKIIDERLITPDGSMLFRVTINS

SEQ ID NO: 3282 - protein, 448 aa, Synthetic construct
MFHYVDVGPRDGTPVLFLHGNPTSSYVWRNIIPHVAPTHRCIAPDLIGMGKSGKPPLGYFFDDHVRFMDAFIEALGLEEVVLVIHDWGSALGFHWAKRNPERVKGIAFMEFIRPIPTWDEWPEFARETFQAFRTTDVGRKLIIDQNVFIEGTLPMGVVRPLTEVEMDHYREPFLNPVDREPLWRFANELPIAGEPANIVALVEEYMDWLHQSPVPKLLFWGTPGVLIPPAEAARLAKSLPNCKAVDIGPGLNLLQEDNPDLIGSEIARWLSTLEISGGSGGSGGGGSGGMVFTLEDFVGDWEQTAAYNLDQVLEQGGVSSLLQNLAVSVTPIQRIVRSGENALKIDIHVIIPYEGLSADQMAQIEEVFKVVYPVDDHHFKVILPYGTLVIDGVTPNMLNYFGRPYEGIAVFDGKKITVTGTLWNGNKIIDERLITPDGSMLFRVTINS

SEQ ID NO: 3283 - protein, 448 aa, Synthetic construct
MFHYVDVGPRDGTPVLFLHGNPTSSYVWRNIIPHVAPTHRCIAPDLIGFGKSGKPDIGYFFDDHVRFMDAFIEALGLEEVVLVIHDWGSALGFHWAKRNPERVKGIAFMEFIRPIPTWDEWPEFARETFQAFRTTDVGRKLIIDQNVFIEGTLPMGVVRPLTEVEMDHYREPFLNPVDREPLWRFPNELPIAGEPANIVALVEEYMDWLHQSPVPKLLFWGTPGVLIPPAEAARLAKSLPNCKAVDIGPGLNLLQEDNPDLIGSEIARWLSTLEISGGSGGSGGGGSGGMVFTLEDFVGDWEQTAAYNLDQVLEQGGVSSLLQNLAVSVTPIQRIVRSGENALKIDIHVIIPYEGLSADQMAQIEEVFKVVYPVDDHHFKVILPYGTLVIDGVTPNMLNYFGRPYEGIAVFDGKKITVTGTLWNGNKIIDERLITPDGSMLFRVTINS

SEQ ID NO: 3284 - protein, 448 aa, Synthetic construct
MFHYVDVGPRDGTPVLFLHGNPTSSYVWRNIIPHVAPTHRCIAPDLIGMGKSGKPDIGYFFDDHVRFMDAFIEALGLEEVVLVIHDWGSALGFHWAKRNPERVKGIAFMEFIRPIPTWDEWPEFAREMFQAFRTTDVGRKLIIDQNVFIEGTLPMGVVRPLTEVEMDHYREPFLNPVDREPLWRFPNELPIAGEPANIVALVEEYMDWLHQSPVPKLLFWGTPGVLIPPAEAARLAKSLPNCKAVDIGPGLNLLQEDNPDLIGSEIARWLSTLEISGGSGGSGGGGSGGMVFTLEDFVGDWEQTAAYNLDQVLEQGGVSSLLQNLAVSVTPIQRIVRSGENALKIDIHVIIPYEGLSADQMAQIEEVFKVVYPVDDHHFKVILPYGTLVIDGVTPNMLNYFGRPYEGIAVFDGKKITVTGTLWNGNKIIDERLITPDGSMLFRVTINS

SEQ ID NO: 3285 - protein, 448 aa, Synthetic construct
MFHYVDVGPRDGTPVLFLHGNPTSSYVWRNIIPHVAPTHRCIAPDLIGMGKSGKPDIGYFFDDHVRFMDAFIEALGLEEVVLVIHDWGSALGFHWAKRNPERVKGIAFMEFIRPIPTWDEWPEFARETFQAFRTTDVGRKLIIDQNVMIEGTLPMGVVRPLTEVEMDHYREPFLNPVDREPLWRFPNELPIAGEPANIVALVEEYMDWLHQSPVPKLLFWGTPGVLIPPAEAARLAKSLPNCKAVDIGPGLNLLQEDNPDLIGSEIARWLSTLEISGGSGGSGGGGSGGMVFTLEDFVGDWEQTAAYNLDQVLEQGGVSSLLQNLAVSVTPIQRIVRSGENALKIDIHVIIPYEGLSADQMAQIEEVFKVVYPVDDHHFKVILPYGTLVIDGVTPNMLNYFGRPYEGIAVFDGKKITVTGTLWNGNKIIDERLITPDGSMLFRVTINS

SEQ ID NO: 3286 - protein, 448 aa, Synthetic construct
MFHYVDVGPRDGTPVLFLHGNPTSSYVWRNIIPHVAPTHRCIAPDLIGMGKSGKPDIGYFFDDHVRFMDAFIEALGLEEVVLVIHDWGSALGFHWAKRNPERVKGIAFMEFIRPIPTWDEWPEFARETFQAFRTTDVGRKLIIDQNVFIEGTLPMGVVRPLTEVEMDHYREPFLNPEDREPLWRFPNELPIAGEPANIVALVEEYMDWLHQSPVPKLLFWGTPGVLIPPAEAARLAKSLPNCKAVDIGPGLNLLQEDNPDLIGSEIARWLSTLEISGGSGGSGGGGSGGMVFTLEDFVGDWEQTAAYNLDQVLEQGGVSSLLQNLAVSVTPIQRIVRSGENALKIDIHVIIPYEGLSADQMAQIEEVFKVVYPVDDHHFKVILPYGTLVIDGVTPNMLNYFGRPYEGIAVFDGKKITVTGTLWNGNKIIDERLITPDGSMLFRVTINS

SEQ ID NO: 3287 - protein, 448 aa, Synthetic construct
MFHYVDVGPRDGTPVLFLHGNPTSSYVWRNIIPHVAPTHRCIAPDLIGMGKSGKPDIGYFFDDHVRFMDAFIEALGLEEVVLVIHDWGSALGFHWAKRNPERVKGIAFMEFIRPIPTWDEWPEFARETFQAFRTTDVGRKLIIDQNVFIEGTLPMGVVRPLTEVEMDHYREPFLNPVDREPLWRFANELPIAGEPANIVALVEEYMDWLHQSPVPKLLFWGTPGVLIPPAEAARLAKSLPNCKAVDIGPGLNLLQEDNPDLIGSEIARWLSTLEISGGSGGSGGGGSGGMVFTLEDFVGDWEQTAAYNLDQVLEQGGVSSLLQNLAVSVTPIQRIVRSGENALKIDIHVIIPYEGLSADQMAQIEEVFKVVYPVDDHHFKVILPYGTLVIDGVTPNMLNYFGRPYEGIAVFDGKKITVTGTLWNGNKIIDERLITPDGSMLFRVTINS

SEQ ID NO: 3288 - protein, 448 aa, Synthetic construct
MFHYVDVGPRDGTPVLFLHGNPTSSYVWRNIIPHVAPTHRCIAPDLIGFGKSGKPDLGYFFDDHVRFMDAFIEALGLEEVVLVIHDWGAALGFHWAKRNPERVKGIAFMEFIRPIPTWDEWPEFARETFQAFRTTDVGRKLIIDQNVFIEGTLPMGVVRPLTEVEMDHYREPFLNPVDREPLWRFPNELPIAGEPANIVALVEEYMDWLHQSPVPKLLFWGTPGVLIPPAEAARLAKSLPNCKAVDIGPGLNLLQEDNPDLIGSEIARWLSTLEISGGSGGSGGGGSGGMVFTLEDFVGDWEQTAAYNLDQVLEQGGVSSLLQNLAVSVTPIQRIVRSGENALKIDIHVIIPYEGLSADQMAQIEEVFKVVYPVDDHHFKVILPYGTLVIDGVTPNMLNYFGRPYEGIAVFDGKKITVTGTLWNGNKIIDERLITPDGSMLFRVTINS

SEQ ID NO: 3289 - protein, 448 aa, Synthetic construct
MFHYVDVGPRDGTPVLFLHGNPTSSYVWRNIIPHVAPTHRCIAPDLIGMGKSGKPDIGYFFDDHVRFMDAFIEALGLEEVVLVIHDWGAALGFHWAKRNPERVKGIAFMEFIRPIPTWDEWPEFARETFQAFRTTDVGRKLIIDQNVFIEGTLPMGVVRPLTEVEMDHYREPFLNPVDREPLWRFPNELPIAGEPANIVALVEEYMDWLHQSPVPKLLFWGTPGVLIPPAEAARLAKSLPNCKAVDIGPGLNLLQEDNPDLIGSEIARWLSTLEISGGSGGSGGGGSGGMVFTLEDFVGDWEQTAAYNLDQVLEQGGVSSLLQNLAVSVTPIQRIVRSGENALKIDIHVIIPYEGLSADQMAQIEEVFKVVYPVDDHHFKVILPYGTLVIDGVTPNMLNYFGRPYEGIAVFDGKKITVTGTLWNGNKIIDERLITPDGSMLFRVTINS

SEQ ID NO: 3290 - protein, 448 aa, Synthetic construct
MFHYVDVGPRDGTPVLFLHGNPTSSYVWRNIIPHVAPTHRCIAPDLIGMGKSGKPDLGYFFDDHVRFMDAFIEALGLEEVVLVIHDWGAALGFHWAKRNPERVKGIAFMEFIRPIPTWDEWPEFAREMFQAFRTTDVGRKLIIDQNVFIEGTLPMGVVRPLTEVEMDHYREPFLNPVDREPLWRFPNELPIAGEPANIVALVEEYMDWLHQSPVPKLLFWGTPGVLIPPAEAARLAKSLPNCKAVDIGPGLNLLQEDNPDLIGSEIARWLSTLEISGGSGGSGGGGSGGMVFTLEDFVGDWEQTAAYNLDQVLEQGGVSSLLQNLAVSVTPIQRIVRSGENALKIDIHVIIPYEGLSADQMAQIEEVFKVVYPVDDHHFKVILPYGTLVIDGVTPNMLNYFGRPYEGIAVFDGKKITVTGTLWNGNKIIDERLITPDGSMLFRVTINS

SEQ ID NO: 3291 - protein, 448 aa, Synthetic construct
MFHYVDVGPRDGTPVLFLHGNPTSSYVWRNIIPHVAPTHRCIAPDLIGMGKSGKPDLGYFFDDHVRFMDAFIEALGLEEVVLVIHDWGAALGFHWAKRNPERVKGIAFMEFIRPIPTWDEWPEFARETFQAFRTTDVGRKLIIDQNVMIEGTLPMGVVRPLTEVEMDHYREPFLNPVDREPLWRFPNELPIAGEPANIVALVEEYMDWLHQSPVPKLLFWGTPGVLIPPAEAARLAKSLPNCKAVDIGPGLNLLQEDNPDLIGSEIARWLSTLEISGGSGGSGGGGSGGMVFTLEDFVGDWEQTAAYNLDQVLEQGGVSSLLQNLAVSVTPIQRIVRSGENALKIDIHVIIPYEGLSADQMAQIEEVFKVVYPVDDHHFKVILPYGTLVIDGVTPNMLNYFGRPYEGIAVFDGKKITVTGTLWNGNKIIDERLITPDGSMLFRVTINS

SEQ ID NO: 3292 - protein, 448 aa, Synthetic construct
MFHYVDVGPRDGTPVLFLHGNPTSSYVWRNIIPHVAPTHRCIAPDLIGMGKSGKPDLGYFFDDHVRFMDAFIEALGLEEVVLVIHDWGAALGFHWAKRNPERVKGIAFMEFIRPIPTWDEWPEFARETFQAFRTTDVGRKLIIDQNVFIEGTLPMGVVRPLTEVEMDHYREPFLNPEDREPLWRFPNELPIAGEPANIVALVEEYMDWLHQSPVPKLLFWGTPGVLIPPAEAARLAKSLPNCKAVDIGPGLNLLQEDNPDLIGSEIARWLSTLEISGGSGGSGGGGSGGMVFTLEDFVGDWEQTAAYNLDQVLEQGGVSSLLQNLAVSVTPIQRIVRSGENALKIDIHVIIPYEGLSADQMAQIEEVFKVVYPVDDHHFKVILPYGTLVIDGVTPNMLNYFGRPYEGIAVFDGKKITVTGTLWNGNKIIDERLITPDGSMLFRVTINS

SEQ ID NO: 3293 - protein, 448 aa, Synthetic construct
MFHYVDVGPRDGTPVLFLHGNPTSSYVWRNIIPHVAPTHRCIAPDLIGMGKSGKPDLGYFFDDHVRFMDAFIEALGLEEVVLVIHDWGAALGFHWAKRNPERVKGIAFMEFIRPIPTWDEWPEFARETFQAFRTTDVGRKLIIDQNVFIEGTLPMGVVRPLTEVEMDHYREPFLNPVDREPLWRFANELPIAGEPANIVALVEEYMDWLHQSPVPKLLFWGTPGVLIPPAEAARLAKSLPNCKAVDIGPGLNLLQEDNPDLIGSEIARWLSTLEISGGSGGSGGGGSGGMVFTLEDFVGDWEQTAAYNLDQVLEQGGVSSLLQNLAVSVTPIQRIVRSGENALKIDIHVIIPYEGLSADQMAQIEEVFKVVYPVDDHHFKVILPYGTLVIDGVTPNMLNYFGRPYEGIAVFDGKKITVTGTLWNGNKIIDERLITPDGSMLFRVTINS

SEQ ID NO: 3294 - protein, 448 aa, Synthetic construct
MFHYVDVGPRDGTPVLFLHGNPTSSYVWRNIIPHVAPTHRCIAPDLIGFGKSGKPDLGYFFDDHVRFMDAFIEALGLEEVVLVIHDWGSALGFHWAKRNPERVKGIAFMEFIRPIPTWDEWPEFARETFQAFRTTDVGRKLIIDQNVFIEGTLPMGVVRPLTEVEMDHYREPFLNPEDREPLWRFPNELPIAGEPANIVALVEEYMDWLHQSPVPKLLFWGTPGVLIPPAEAARLAKSLPNCKAVDIGPGLNLLQEDNPDLIGSEIARWLSTLEISGGSGGSGGGGSGGMVFTLEDFVGDWEQTAAYNLDQVLEQGGVSSLLQNLAVSVTPIQRIVRSGENALKIDIHVIIPYEGLSADQMAQIEEVFKVVYPVDDHHFKVILPYGTLVIDGVTPNMLNYFGRPYEGIAVFDGKKITVTGTLWNGNKIIDERLITPDGSMLFRVTINS

SEQ ID NO: 3295 - protein, 448 aa, Synthetic construct
MFHYVDVGPRDGTPVLFLHGNPTSSYVWRNIIPHVAPTHRCIAPDLIGMGKSGKPDLGYFFDDHVRFMDAFIEALGLEEVVLVIHDWGSALGFHWAKRNPERVKGIAFMEFIRPIPTWDEWPEFAREMFQAFRTTDVGRKLIIDQNVFIEGTLPMGVVRPLTEVEMDHYREPFLNPEDREPLWRFPNELPIAGEPANIVALVEEYMDWLHQSPVPKLLFWGTPGVLIPPAEAARLAKSLPNCKAVDIGPGLNLLQEDNPDLIGSEIARWLSTLEISGGSGGSGGGGSGGMVFTLEDFVGDWEQTAAYNLDQVLEQGGVSSLLQNLAVSVTPIQRIVRSGENALKIDIHVIIPYEGLSADQMAQIEEVFKVVYPVDDHHFKVILPYGTLVIDGVTPNMLNYFGRPYEGIAVFDGKKITVTGTLWNGNKIIDERLITPDGSMLFRVTINS

SEQ ID NO: 3296 - protein, 448 aa, Synthetic construct
MFHYVDVGPRDGTPVLFLHGNPTSSYVWRNIIPHVAPTHRCIAPDLIGMGKSGKPDLGYFFDDHVRFMDAFIEALGLEEVVLVIHDWGSALGFHWAKRNPERVKGIAFMEFIRPIPTWDEWPEFARETFQAFRTTDVGRKLIIDQNVMIEGTLPMGVVRPLTEVEMDHYREPFLNPEDREPLWRFPNELPIAGEPANIVALVEEYMDWLHQSPVPKLLFWGTPGVLIPPAEAARLAKSLPNCKAVDIGPGLNLLQEDNPDLIGSEIARWLSTLEISGGSGGSGGGGSGGMVFTLEDFVGDWEQTAAYNLDQVLEQGGVSSLLQNLAVSVTPIQRIVRSGENALKIDIHVIIPYEGLSADQMAQIEEVFKVVYPVDDHHFKVILPYGTLVIDGVTPNMLNYFGRPYEGIAVFDGKKITVTGTLWNGNKIIDERLITPDGSMLFRVTINS

SEQ ID NO: 3297 - protein, 448 aa, Synthetic construct
MFHYVDVGPRDGTPVLFLHGNPTSSYVWRNIIPHVAPTHRCIAPDLIGMGKSGKPDLGYFFDDHVRFMDAFIEALGLEEVVLVIHDWGSALGFHWAKRNPERVKGIAFMEFIRPIPTWDEWPEFARETFQAFRTTDVGRKLIIDQNVFIEGTLPMGVVRPLTEVEMDHYREPFLNPEDREPLWRFANELPIAGEPANIVALVEEYMDWLHQSPVPKLLFWGTPGVLIPPAEAARLAKSLPNCKAVDIGPGLNLLQEDNPDLIGSEIARWLSTLEISGGSGGSGGGGSGGMVFTLEDFVGDWEQTAAYNLDQVLEQGGVSSLLQNLAVSVTPIQRIVRSGENALKIDIHVIIPYEGLSADQMAQIEEVFKVVYPVDDHHFKVILPYGTLVIDGVTPNMLNYFGRPYEGIAVFDGKKITVTGTLWNGNKIIDERLITPDGSMLFRVTINS

SEQ ID NO: 3298 - protein, 448 aa, Synthetic construct
MFHYVDVGPRDGTPVLFLHGNPTSSYVWRNIIPHVAPTHRCIAPDLIGFGKSGKPDLGYFFDDHVRFMDAFIEALGLEEVVLVIHDWGSALGFHWAKRNPERVKGIAFMEFIRPIPTWDEWPEFARETFQAFRTTDVGRKLIIDQNVFIEGTLPMGVVRPLTEVEMDHYREPFLNPVDREPLWRFANELPIAGEPANIVALVEEYMDWLHQSPVPKLLFWGTPGVLIPPAEAARLAKSLPNCKAVDIGPGLNLLQEDNPDLIGSEIARWLSTLEISGGSGGSGGGGSGGMVFTLEDFVGDWEQTAAYNLDQVLEQGGVSSLLQNLAVSVTPIQRIVRSGENALKIDIHVIIPYEGLSADQMAQIEEVFKVVYPVDDHHFKVILPYGTLVIDGVTPNMLNYFGRPYEGIAVFDGKKITVTGTLWNGNKIIDERLITPDGSMLFRVTINS

SEQ ID NO: 3299 - protein, 448 aa, Synthetic construct
MFHYVDVGPRDGTPVLFLHGNPTSSYVWRNIIPHVAPTHRCIAPDLIGMGKSGKPDLGYFFDDHVRFMDAFIEALGLEEVVLVIHDWGSALGFHWAKRNPERVKGIAFMEFIRPIPTWDEWPEFAREMFQAFRTTDVGRKLIIDQNVFIEGTLPMGVVRPLTEVEMDHYREPFLNPVDREPLWRFANELPIAGEPANIVALVEEYMDWLHQSPVPKLLFWGTPGVLIPPAEAARLAKSLPNCKAVDIGPGLNLLQEDNPDLIGSEIARWLSTLEISGGSGGSGGGGSGGMVFTLEDFVGDWEQTAAYNLDQVLEQGGVSSLLQNLAVSVTPIQRIVRSGENALKIDIHVIIPYEGLSADQMAQIEEVFKVVYPVDDHHFKVILPYGTLVIDGVTPNMLNYFGRPYEGIAVFDGKKITVTGTLWNGNKIIDERLITPDGSMLFRVTINS

SEQ ID NO: 3300 - protein, 448 aa, Synthetic construct
MFHYVDVGPRDGTPVLFLHGNPTSSYVWRNIIPHVAPTHRCIAPDLIGMGKSGKPDLGYFFDDHVRFMDAFIEALGLEEVVLVIHDWGSALGFHWAKRNPERVKGIAFMEFIRPIPTWDEWPEFARETFQAFRTTDVGRKLIIDQNVMIEGTLPMGVVRPLTEVEMDHYREPFLNPVDREPLWRFANELPIAGEPANIVALVEEYMDWLHQSPVPKLLFWGTPGVLIPPAEAARLAKSLPNCKAVDIGPGLNLLQEDNPDLIGSEIARWLSTLEISGGSGGSGGGGSGGMVFTLEDFVGDWEQTAAYNLDQVLEQGGVSSLLQNLAVSVTPIQRIVRSGENALKIDIHVIIPYEGLSADQMAQIEEVFKVVYPVDDHHFKVILPYGTLVIDGVTPNMLNYFGRPYEGIAVFDGKKITVTGTLWNGNKIIDERLITPDGSMLFRVTINS

SEQ ID NO: 3301 - protein, 448 aa, Synthetic construct
MFHYVDVGPRDGTPVLFLHGNPTSSYVWRNIIPHVAPTHRCIAPDLIGFGKSGKPDLGYFFDDHVRFMDAFIEALGLEEVVLVIHDWGSALGFHWAKRNPERVKGIAFMEFIRPIPTWDEWPEFARETFQAFRTTDVGRKLIIDQNVFIEGTLPMGVVRPLTEVEMDHYREPFLNPVDREPLWRFPNELPIAGEPANIVALVEEYMDWLHQSPVPKLLFWGTPGVLIPPAEAARLAKSLPNCKAVDIGPGLNILQEDNPDLIGSEIARWLSTLEISGGSGGSGGGGSGGMVFTLEDFVGDWEQTAAYNLDQVLEQGGVSSLLQNLAVSVTPIQRIVRSGENALKIDIHVIIPYEGLSADQMAQIEEVFKVVYPVDDHHFKVILPYGTLVIDGVTPNMLNYFGRPYEGIAVFDGKKITVTGTLWNGNKIIDERLITPDGSMLFRVTINS

SEQ ID NO: 3302 - protein, 448 aa, Synthetic construct
MFHYVDVGPRDGTPVLFLHGNPTSSYVWRNIIPHVAPTHRCIAPDLIGMGKSGKPDIGYFFDDHVRFMDAFIEALGLEEVVLVIHDWGSALGFHWAKRNPERVKGIAFMEFIRPIPTWDEWPEFARETFQAFRTTDVGRKLIIDQNVFIEGTLPMGVVRPLTEVEMDHYREPFLNPVDREPLWRFPNELPIAGEPANIVALVEEYMDWLHQSPVPKLLFWGTPGVLIPPAEAARLAKSLPNCKAVDIGPGLNILQEDNPDLIGSEIARWLSTLEISGGSGGSGGGGSGGMVFTLEDFVGDWEQTAAYNLDQVLEQGGVSSLLQNLAVSVTPIQRIVRSGENALKIDIHVIIPYEGLSADQMAQIEEVFKVVYPVDDHHFKVILPYGTLVIDGVTPNMLNYFGRPYEGIAVFDGKKITVTGTLWNGNKIIDERLITPDGSMLFRVTINS

SEQ ID NO: 3303 - protein, 448 aa, Synthetic construct
MFHYVDVGPRDGTPVLFLHGNPTSSYVWRNIIPHVAPTHRCIAPDLIGMGKSGKPDLGYFFDDHVRFMDAFIEALGLEEVVLVIHDWGSALGFHWAKRNPERVKGIAFMEFIRPIPTWDEWPEFAREMFQAFRTTDVGRKLIIDQNVFIEGTLPMGVVRPLTEVEMDHYREPFLNPVDREPLWRFPNELPIAGEPANIVALVEEYMDWLHQSPVPKLLFWGTPGVLIPPAEAARLAKSLPNCKAVDIGPGLNILQEDNPDLIGSEIARWLSTLEISGGSGGSGGGGSGGMVFTLEDFVGDWEQTAAYNLDQVLEQGGVSSLLQNLAVSVTPIQRIVRSGENALKIDIHVIIPYEGLSADQMAQIEEVFKVVYPVDDHHFKVILPYGTLVIDGVTPNMLNYFGRPYEGIAVFDGKKITVTGTLWNGNKIIDERLITPDGSMLFRVTINS

SEQ ID NO: 3304 - protein, 448 aa, Synthetic construct
MFHYVDVGPRDGTPVLFLHGNPTSSYVWRNIIPHVAPTHRCIAPDLIGMGKSGKPDLGYFFDDHVRFMDAFIEALGLEEVVLVIHDWGSALGFHWAKRNPERVKGIAFMEFIRPIPTWDEWPEFARETFQAFRTTDVGRKLIIDQNVMIEGTLPMGVVRPLTEVEMDHYREPFLNPVDREPLWRFPNELPIAGEPANIVALVEEYMDWLHQSPVPKLLFWGTPGVLIPPAEAARLAKSLPNCKAVDIGPGLNILQEDNPDLIGSEIARWLSTLEISGGSGGSGGGGSGGMVFTLEDFVGDWEQTAAYNLDQVLEQGGVSSLLQNLAVSVTPIQRIVRSGENALKIDIHVIIPYEGLSADQMAQIEEVFKVVYPVDDHHFKVILPYGTLVIDGVTPNMLNYFGRPYEGIAVFDGKKITVTGTLWNGNKIIDERLITPDGSMLFRVTINS

SEQ ID NO: 3305 - protein, 448 aa, Synthetic construct
MFHYVDVGPRDGTPVLFLHGNPTSSYVWRNIIPHVAPTHRCIAPDLIGMGKSGKPDLGYFFDDHVRFMDAFIEALGLEEVVLVIHDWGSALGFHWAKRNPERVKGIAFMEFIRPIPTWDEWPEFARETFQAFRTTDVGRKLIIDQNVFIEGTLPMGVVRPLTEVEMDHYREPFLNPEDREPLWRFPNELPIAGEPANIVALVEEYMDWLHQSPVPKLLFWGTPGVLIPPAEAARLAKSLPNCKAVDIGPGLNILQEDNPDLIGSEIARWLSTLEISGGSGGSGGGGSGGMVFTLEDFVGDWEQTAAYNLDQVLEQGGVSSLLQNLAVSVTPIQRIVRSGENALKIDIHVIIPYEGLSADQMAQIEEVFKVVYPVDDHHFKVILPYGTLVIDGVTPNMLNYFGRPYEGIAVFDGKKITVTGTLWNGNKIIDERLITPDGSMLFRVTINS

SEQ ID NO: 3306 - protein, 448 aa, Synthetic construct
MFHYVDVGPRDGTPVLFLHGNPTSSYVWRNIIPHVAPTHRCIAPDLIGMGKSGKPDLGYFFDDHVRFMDAFIEALGLEEVVLVIHDWGSALGFHWAKRNPERVKGIAFMEFIRPIPTWDEWPEFARETFQAFRTTDVGRKLIIDQNVFIEGTLPMGVVRPLTEVEMDHYREPFLNPVDREPLWRFANELPIAGEPANIVALVEEYMDWLHQSPVPKLLFWGTPGVLIPPAEAARLAKSLPNCKAVDIGPGLNILQEDNPDLIGSEIARWLSTLEISGGSGGSGGGGSGGMVFTLEDFVGDWEQTAAYNLDQVLEQGGVSSLLQNLAVSVTPIQRIVRSGENALKIDIHVIIPYEGLSADQMAQIEEVFKVVYPVDDHHFKVILPYGTLVIDGVTPNMLNYFGRPYEGIAVFDGKKITVTGTLWNGNKIIDERLITPDGSMLFRVTINS

SEQ ID NO: 3307 - protein, 448 aa, Synthetic construct
MFHYVDVGPRDGTPVLFLHGNPTSSYVWRNIIPHVAPTHRCIAPDLIGFGKSSKPPLGYFFDDHVRFMDAFIEALGLEEVVLVIHDWGSALGFHWAKRNPERVKGIAFMEFIRPIPTWDEWPEFARETFQAFRTTDVGRKLIIDQNVFIEGTLPMGVVRPLTEVEMDHYREPFLNPVDREPLWRFPNELPIAGEPANIVALVEEYMDWLHQSPVPKLLFWGTPGVLIPPAEAARLAKSLPNCKAVDIGPGLNLLQEDNPDLIGSEIARWLSTLEISGGSGGSGGGGSGGMVFTLEDFVGDWEQTAAYNLDQVLEQGGVSSLLQNLAVSVTPIQRIVRSGENALKIDIHVIIPYEGLSADQMAQIEEVFKVVYPVDDHHFKVILPYGTLVIDGVTPNMLNYFGRPYEGIAVFDGKKITVTGTLWNGNKIIDERLITPDGSMLFRVTINS

SEQ ID NO: 3308 - protein, 448 aa, Synthetic construct
MFHYVDVGPRDGTPVLFLHGNPTSSYVWRNIIPHVAPTHRCIAPDLIGMGKSSKPPIGYFFDDHVRFMDAFIEALGLEEVVLVIHDWGSALGFHWAKRNPERVKGIAFMEFIRPIPTWDEWPEFARETFQAFRTTDVGRKLIIDQNVFIEGTLPMGVVRPLTEVEMDHYREPFLNPVDREPLWRFPNELPIAGEPANIVALVEEYMDWLHQSPVPKLLFWGTPGVLIPPAEAARLAKSLPNCKAVDIGPGLNLLQEDNPDLIGSEIARWLSTLEISGGSGGSGGGGSGGMVFTLEDFVGDWEQTAAYNLDQVLEQGGVSSLLQNLAVSVTPIQRIVRSGENALKIDIHVIIPYEGLSADQMAQIEEVFKVVYPVDDHHFKVILPYGTLVIDGVTPNMLNYFGRPYEGIAVFDGKKITVTGTLWNGNKIIDERLITPDGSMLFRVTINS

SEQ ID NO: 3309 - protein, 448 aa, Synthetic construct
MFHYVDVGPRDGTPVLFLHGNPTSSYVWRNIIPHVAPTHRCIAPDLIGMGKSSKPPLGYFFDDHVRFMDAFIEALGLEEVVLVIHDWGSALGFHWAKRNPERVKGIAFMEFIRPIPTWDEWPEFAREMFQAFRTTDVGRKLIIDQNVFIEGTLPMGVVRPLTEVEMDHYREPFLNPVDREPLWRFPNELPIAGEPANIVALVEEYMDWLHQSPVPKLLFWGTPGVLIPPAEAARLAKSLPNCKAVDIGPGLNLLQEDNPDLIGSEIARWLSTLEISGGSGGSGGGGSGGMVFTLEDFVGDWEQTAAYNLDQVLEQGGVSSLLQNLAVSVTPIQRIVRSGENALKIDIHVIIPYEGLSADQMAQIEEVFKVVYPVDDHHFKVILPYGTLVIDGVTPNMLNYFGRPYEGIAVFDGKKITVTGTLWNGNKIIDERLITPDGSMLFRVTINS

SEQ ID NO: 3310 - protein, 448 aa, Synthetic construct
MFHYVDVGPRDGTPVLFLHGNPTSSYVWRNIIPHVAPTHRCIAPDLIGMGKSSKPPLGYFFDDHVRFMDAFIEALGLEEVVLVIHDWGSALGFHWAKRNPERVKGIAFMEFIRPIPTWDEWPEFARETFQAFRTTDVGRKLIIDQNVMIEGTLPMGVVRPLTEVEMDHYREPFLNPVDREPLWRFPNELPIAGEPANIVALVEEYMDWLHQSPVPKLLFWGTPGVLIPPAEAARLAKSLPNCKAVDIGPGLNLLQEDNPDLIGSEIARWLSTLEISGGSGGSGGGGSGGMVFTLEDFVGDWEQTAAYNLDQVLEQGGVSSLLQNLAVSVTPIQRIVRSGENALKIDIHVIIPYEGLSADQMAQIEEVFKVVYPVDDHHFKVILPYGTLVIDGVTPNMLNYFGRPYEGIAVFDGKKITVTGTLWNGNKIIDERLITPDGSMLFRVTINS

SEQ ID NO: 3311 - protein, 448 aa, Synthetic construct
MFHYVDVGPRDGTPVLFLHGNPTSSYVWRNIIPHVAPTHRCIAPDLIGMGKSSKPPLGYFFDDHVRFMDAFIEALGLEEVVLVIHDWGSALGFHWAKRNPERVKGIAFMEFIRPIPTWDEWPEFARETFQAFRTTDVGRKLIIDQNVFIEGTLPMGVVRPLTEVEMDHYREPFLNPEDREPLWRFPNELPIAGEPANIVALVEEYMDWLHQSPVPKLLFWGTPGVLIPPAEAARLAKSLPNCKAVDIGPGLNLLQEDNPDLIGSEIARWLSTLEISGGSGGSGGGGSGGMVFTLEDFVGDWEQTAAYNLDQVLEQGGVSSLLQNLAVSVTPIQRIVRSGENALKIDIHVIIPYEGLSADQMAQIEEVFKVVYPVDDHHFKVILPYGTLVIDGVTPNMLNYFGRPYEGIAVFDGKKITVTGTLWNGNKIIDERLITPDGSMLFRVTINS

SEQ ID NO: 3312 - protein, 448 aa, Synthetic construct
MFHYVDVGPRDGTPVLFLHGNPTSSYVWRNIIPHVAPTHRCIAPDLIGMGKSSKPPLGYFFDDHVRFMDAFIEALGLEEVVLVIHDWGSALGFHWAKRNPERVKGIAFMEFIRPIPTWDEWPEFARETFQAFRTTDVGRKLIIDQNVFIEGTLPMGVVRPLTEVEMDHYREPFLNPVDREPLWRFANELPIAGEPANIVALVEEYMDWLHQSPVPKLLFWGTPGVLIPPAEAARLAKSLPNCKAVDIGPGLNLLQEDNPDLIGSEIARWLSTLEISGGSGGSGGGGSGGMVFTLEDFVGDWEQTAAYNLDQVLEQGGVSSLLQNLAVSVTPIQRIVRSGENALKIDIHVIIPYEGLSADQMAQIEEVFKVVYPVDDHHFKVILPYGTLVIDGVTPNMLNYFGRPYEGIAVFDGKKITVTGTLWNGNKIIDERLITPDGSMLFRVTINS

SEQ ID NO: 3313 - protein, 448 aa, Synthetic construct
MFHYVDVGPRDGTPVLFLHGNPTSSYVWRNIIPHVAPTHRCIAPDLIGFGKSSKPDIGYFFDDHVRFMDAFIEALGLEEVVLVIHDWGSALGFHWAKRNPERVKGIAFMEFIRPIPTWDEWPEFARETFQAFRTTDVGRKLIIDQNVFIEGTLPMGVVRPLTEVEMDHYREPFLNPVDREPLWRFPNELPIAGEPANIVALVEEYMDWLHQSPVPKLLFWGTPGVLIPPAEAARLAKSLPNCKAVDIGPGLNLLQEDNPDLIGSEIARWLSTLEISGGSGGSGGGGSGGMVFTLEDFVGDWEQTAAYNLDQVLEQGGVSSLLQNLAVSVTPIQRIVRSGENALKIDIHVIIPYEGLSADQMAQIEEVFKVVYPVDDHHFKVILPYGTLVIDGVTPNMLNYFGRPYEGIAVFDGKKITVTGTLWNGNKIIDERLITPDGSMLFRVTINS

SEQ ID NO: 3314 - protein, 448 aa, Synthetic construct
MFHYVDVGPRDGTPVLFLHGNPTSSYVWRNIIPHVAPTHRCIAPDLIGMGKSSKPDIGYFFDDHVRFMDAFIEALGLEEVVLVIHDWGSALGFHWAKRNPERVKGIAFMEFIRPIPTWDEWPEFAREMFQAFRTTDVGRKLIIDQNVFIEGTLPMGVVRPLTEVEMDHYREPFLNPVDREPLWRFPNELPIAGEPANIVALVEEYMDWLHQSPVPKLLFWGTPGVLIPPAEAARLAKSLPNCKAVDIGPGLNLLQEDNPDLIGSEIARWLSTLEISGGSGGSGGGGSGGMVFTLEDFVGDWEQTAAYNLDQVLEQGGVSSLLQNLAVSVTPIQRIVRSGENALKIDIHVIIPYEGLSADQMAQIEEVFKVVYPVDDHHFKVILPYGTLVIDGVTPNMLNYFGRPYEGIAVFDGKKITVTGTLWNGNKIIDERLITPDGSMLFRVTINS

SEQ ID NO: 3315 - protein, 448 aa, Synthetic construct
MFHYVDVGPRDGTPVLFLHGNPTSSYVWRNIIPHVAPTHRCIAPDLIGMGKSSKPDIGYFFDDHVRFMDAFIEALGLEEVVLVIHDWGSALGFHWAKRNPERVKGIAFMEFIRPIPTWDEWPEFARETFQAFRTTDVGRKLIIDQNVMIEGTLPMGVVRPLTEVEMDHYREPFLNPVDREPLWRFPNELPIAGEPANIVALVEEYMDWLHQSPVPKLLFWGTPGVLIPPAEAARLAKSLPNCKAVDIGPGLNLLQEDNPDLIGSEIARWLSTLEISGGSGGSGGGGSGGMVFTLEDFVGDWEQTAAYNLDQVLEQGGVSSLLQNLAVSVTPIQRIVRSGENALKIDIHVIIPYEGLSADQMAQIEEVFKVVYPVDDHHFKVILPYGTLVIDGVTPNMLNYFGRPYEGIAVFDGKKITVTGTLWNGNKIIDERLITPDGSMLFRVTINS

SEQ ID NO: 3316 - protein, 448 aa, Synthetic construct
MFHYVDVGPRDGTPVLFLHGNPTSSYVWRNIIPHVAPTHRCIAPDLIGMGKSSKPDIGYFFDDHVRFMDAFIEALGLEEVVLVIHDWGSALGFHWAKRNPERVKGIAFMEFIRPIPTWDEWPEFARETFQAFRTTDVGRKLIIDQNVFIEGTLPMGVVRPLTEVEMDHYREPFLNPEDREPLWRFPNELPIAGEPANIVALVEEYMDWLHQSPVPKLLFWGTPGVLIPPAEAARLAKSLPNCKAVDIGPGLNLLQEDNPDLIGSEIARWLSTLEISGGSGGSGGGGSGGMVFTLEDFVGDWEQTAAYNLDQVLEQGGVSSLLQNLAVSVTPIQRIVRSGENALKIDIHVIIPYEGLSADQMAQIEEVFKVVYPVDDHHFKVILPYGTLVIDGVTPNMLNYFGRPYEGIAVFDGKKITVTGTLWNGNKIIDERLITPDGSMLFRVTINS

SEQ ID NO: 3317 - protein, 448 aa, Synthetic construct
MFHYVDVGPRDGTPVLFLHGNPTSSYVWRNIIPHVAPTHRCIAPDLIGMGKSSKPDIGYFFDDHVRFMDAFIEALGLEEVVLVIHDWGSALGFHWAKRNPERVKGIAFMEFIRPIPTWDEWPEFARETFQAFRTTDVGRKLIIDQNVFIEGTLPMGVVRPLTEVEMDHYREPFLNPVDREPLWRFANELPIAGEPANIVALVEEYMDWLHQSPVPKLLFWGTPGVLIPPAEAARLAKSLPNCKAVDIGPGLNLLQEDNPDLIGSEIARWLSTLEISGGSGGSGGGGSGGMVFTLEDFVGDWEQTAAYNLDQVLEQGGVSSLLQNLAVSVTPIQRIVRSGENALKIDIHVIIPYEGLSADQMAQIEEVFKVVYPVDDHHFKVILPYGTLVIDGVTPNMLNYFGRPYEGIAVFDGKKITVTGTLWNGNKIIDERLITPDGSMLFRVTINS

SEQ ID NO: 3318 - protein, 448 aa, Synthetic construct
MFHYVDVGPRDGTPVLFLHGNPTSSYVWRNIIPHVAPTHRCIAPDLIGFGKSSKPDLGYFFDDHVRFMDAFIEALGLEEVVLVIHDWGAALGFHWAKRNPERVKGIAFMEFIRPIPTWDEWPEFARETFQAFRTTDVGRKLIIDQNVFIEGTLPMGVVRPLTEVEMDHYREPFLNPVDREPLWRFPNELPIAGEPANIVALVEEYMDWLHQSPVPKLLFWGTPGVLIPPAEAARLAKSLPNCKAVDIGPGLNLLQEDNPDLIGSEIARWLSTLEISGGSGGSGGGGSGGMVFTLEDFVGDWEQTAAYNLDQVLEQGGVSSLLQNLAVSVTPIQRIVRSGENALKIDIHVIIPYEGLSADQMAQIEEVFKVVYPVDDHHFKVILPYGTLVIDGVTPNMLNYFGRPYEGIAVFDGKKITVTGTLWNGNKIIDERLITPDGSMLFRVTINS

SEQ ID NO: 3319 - protein, 448 aa, Synthetic construct
MFHYVDVGPRDGTPVLFLHGNPTSSYVWRNIIPHVAPTHRCIAPDLIGMGKSSKPDIGYFFDDHVRFMDAFIEALGLEEVVLVIHDWGAALGFHWAKRNPERVKGIAFMEFIRPIPTWDEWPEFARETFQAFRTTDVGRKLIIDQNVFIEGTLPMGVVRPLTEVEMDHYREPFLNPVDREPLWRFPNELPIAGEPANIVALVEEYMDWLHQSPVPKLLFWGTPGVLIPPAEAARLAKSLPNCKAVDIGPGLNLLQEDNPDLIGSEIARWLSTLEISGGSGGSGGGGSGGMVFTLEDFVGDWEQTAAYNLDQVLEQGGVSSLLQNLAVSVTPIQRIVRSGENALKIDIHVIIPYEGLSADQMAQIEEVFKVVYPVDDHHFKVILPYGTLVIDGVTPNMLNYFGRPYEGIAVFDGKKITVTGTLWNGNKIIDERLITPDGSMLFRVTINS

SEQ ID NO: 3320 - protein, 448 aa, Synthetic construct
MFHYVDVGPRDGTPVLFLHGNPTSSYVWRNIIPHVAPTHRCIAPDLIGMGKSSKPDLGYFFDDHVRFMDAFIEALGLEEVVLVIHDWGAALGFHWAKRNPERVKGIAFMEFIRPIPTWDEWPEFAREMFQAFRTTDVGRKLIIDQNVFIEGTLPMGVVRPLTEVEMDHYREPFLNPVDREPLWRFPNELPIAGEPANIVALVEEYMDWLHQSPVPKLLFWGTPGVLIPPAEAARLAKSLPNCKAVDIGPGLNLLQEDNPDLIGSEIARWLSTLEISGGSGGSGGGGSGGMVFTLEDFVGDWEQTAAYNLDQVLEQGGVSSLLQNLAVSVTPIQRIVRSGENALKIDIHVIIPYEGLSADQMAQIEEVFKVVYPVDDHHFKVILPYGTLVIDGVTPNMLNYFGRPYEGIAVFDGKKITVTGTLWNGNKIIDERLITPDGSMLFRVTINS

SEQ ID NO: 3321 - protein, 448 aa, Synthetic construct
MFHYVDVGPRDGTPVLFLHGNPTSSYVWRNIIPHVAPTHRCIAPDLIGMGKSSKPDLGYFFDDHVRFMDAFIEALGLEEVVLVIHDWGAALGFHWAKRNPERVKGIAFMEFIRPIPTWDEWPEFARETFQAFRTTDVGRKLIIDQNVMIEGTLPMGVVRPLTEVEMDHYREPFLNPVDREPLWRFPNELPIAGEPANIVALVEEYMDWLHQSPVPKLLFWGTPGVLIPPAEAARLAKSLPNCKAVDIGPGLNLLQEDNPDLIGSEIARWLSTLEISGGSGGSGGGGSGGMVFTLEDFVGDWEQTAAYNLDQVLEQGGVSSLLQNLAVSVTPIQRIVRSGENALKIDIHVIIPYEGLSADQMAQIEEVFKVVYPVDDHHFKVILPYGTLVIDGVTPNMLNYFGRPYEGIAVFDGKKITVTGTLWNGNKIIDERLITPDGSMLFRVTINS

SEQ ID NO: 3322 - protein, 448 aa, Synthetic construct
MFHYVDVGPRDGTPVLFLHGNPTSSYVWRNIIPHVAPTHRCIAPDLIGMGKSSKPDLGYFFDDHVRFMDAFIEALGLEEVVLVIHDWGAALGFHWAKRNPERVKGIAFMEFIRPIPTWDEWPEFARETFQAFRTTDVGRKLIIDQNVFIEGTLPMGVVRPLTEVEMDHYREPFLNPEDREPLWRFPNELPIAGEPANIVALVEEYMDWLHQSPVPKLLFWGTPGVLIPPAEAARLAKSLPNCKAVDIGPGLNLLQEDNPDLIGSEIARWLSTLEISGGSGGSGGGGSGGMVFTLEDFVGDWEQTAAYNLDQVLEQGGVSSLLQNLAVSVTPIQRIVRSGENALKIDIHVIIPYEGLSADQMAQIEEVFKVVYPVDDHHFKVILPYGTLVIDGVTPNMLNYFGRPYEGIAVFDGKKITVTGTLWNGNKIIDERLITPDGSMLFRVTINS

SEQ ID NO: 3323 - protein, 448 aa, Synthetic construct
MFHYVDVGPRDGTPVLFLHGNPTSSYVWRNIIPHVAPTHRCIAPDLIGMGKSSKPDLGYFFDDHVRFMDAFIEALGLEEVVLVIHDWGAALGFHWAKRNPERVKGIAFMEFIRPIPTWDEWPEFARETFQAFRTTDVGRKLIIDQNVFIEGTLPMGVVRPLTEVEMDHYREPFLNPVDREPLWRFANELPIAGEPANIVALVEEYMDWLHQSPVPKLLFWGTPGVLIPPAEAARLAKSLPNCKAVDIGPGLNLLQEDNPDLIGSEIARWLSTLEISGGSGGSGGGGSGGMVFTLEDFVGDWEQTAAYNLDQVLEQGGVSSLLQNLAVSVTPIQRIVRSGENALKIDIHVIIPYEGLSADQMAQIEEVFKVVYPVDDHHFKVILPYGTLVIDGVTPNMLNYFGRPYEGIAVFDGKKITVTGTLWNGNKIIDERLITPDGSMLFRVTINS

SEQ ID NO: 3324 - protein, 448 aa, Synthetic construct
MFHYVDVGPRDGTPVLFLHGNPTSSYVWRNIIPHVAPTHRCIAPDLIGFGKSSKPDLGYFFDDHVRFMDAFIEALGLEEVVLVIHDWGSALGFHWAKRNPERVKGIAFMEFIRPIPTWDEWPEFARETFQAFRTTDVGRKLIIDQNVFIEGTLPMGVVRPLTEVEMDHYREPFLNPEDREPLWRFPNELPIAGEPANIVALVEEYMDWLHQSPVPKLLFWGTPGVLIPPAEAARLAKSLPNCKAVDIGPGLNLLQEDNPDLIGSEIARWLSTLEISGGSGGSGGGGSGGMVFTLEDFVGDWEQTAAYNLDQVLEQGGVSSLLQNLAVSVTPIQRIVRSGENALKIDIHVIIPYEGLSADQMAQIEEVFKVVYPVDDHHFKVILPYGTLVIDGVTPNMLNYFGRPYEGIAVFDGKKITVTGTLWNGNKIIDERLITPDGSMLFRVTINS

SEQ ID NO: 3325 - protein, 448 aa, Synthetic construct
MFHYVDVGPRDGTPVLFLHGNPTSSYVWRNIIPHVAPTHRCIAPDLIGMGKSSKPDLGYFFDDHVRFMDAFIEALGLEEVVLVIHDWGSALGFHWAKRNPERVKGIAFMEFIRPIPTWDEWPEFAREMFQAFRTTDVGRKLIIDQNVFIEGTLPMGVVRPLTEVEMDHYREPFLNPEDREPLWRFPNELPIAGEPANIVALVEEYMDWLHQSPVPKLLFWGTPGVLIPPAEAARLAKSLPNCKAVDIGPGLNLLQEDNPDLIGSEIARWLSTLEISGGSGGSGGGGSGGMVFTLEDFVGDWEQTAAYNLDQVLEQGGVSSLLQNLAVSVTPIQRIVRSGENALKIDIHVIIPYEGLSADQMAQIEEVFKVVYPVDDHHFKVILPYGTLVIDGVTPNMLNYFGRPYEGIAVFDGKKITVTGTLWNGNKIIDERLITPDGSMLFRVTINS

SEQ ID NO: 3326 - protein, 448 aa, Synthetic construct
MFHYVDVGPRDGTPVLFLHGNPTSSYVWRNIIPHVAPTHRCIAPDLIGMGKSSKPDLGYFFDDHVRFMDAFIEALGLEEVVLVIHDWGSALGFHWAKRNPERVKGIAFMEFIRPIPTWDEWPEFARETFQAFRTTDVGRKLIIDQNVMIEGTLPMGVVRPLTEVEMDHYREPFLNPEDREPLWRFPNELPIAGEPANIVALVEEYMDWLHQSPVPKLLFWGTPGVLIPPAEAARLAKSLPNCKAVDIGPGLNLLQEDNPDLIGSEIARWLSTLEISGGSGGSGGGGSGGMVFTLEDFVGDWEQTAAYNLDQVLEQGGVSSLLQNLAVSVTPIQRIVRSGENALKIDIHVIIPYEGLSADQMAQIEEVFKVVYPVDDHHFKVILPYGTLVIDGVTPNMLNYFGRPYEGIAVFDGKKITVTGTLWNGNKIIDERLITPDGSMLFRVTINS

SEQ ID NO: 3327 - protein, 448 aa, Synthetic construct
MFHYVDVGPRDGTPVLFLHGNPTSSYVWRNIIPHVAPTHRCIAPDLIGMGKSSKPDLGYFFDDHVRFMDAFIEALGLEEVVLVIHDWGSALGFHWAKRNPERVKGIAFMEFIRPIPTWDEWPEFARETFQAFRTTDVGRKLIIDQNVFIEGTLPMGVVRPLTEVEMDHYREPFLNPEDREPLWRFANELPIAGEPANIVALVEEYMDWLHQSPVPKLLFWGTPGVLIPPAEAARLAKSLPNCKAVDIGPGLNLLQEDNPDLIGSEIARWLSTLEISGGSGGSGGGGSGGMVFTLEDFVGDWEQTAAYNLDQVLEQGGVSSLLQNLAVSVTPIQRIVRSGENALKIDIHVIIPYEGLSADQMAQIEEVFKVVYPVDDHHFKVILPYGTLVIDGVTPNMLNYFGRPYEGIAVFDGKKITVTGTLWNGNKIIDERLITPDGSMLFRVTINS

SEQ ID NO: 3328 - protein, 448 aa, Synthetic construct
MFHYVDVGPRDGTPVLFLHGNPTSSYVWRNIIPHVAPTHRCIAPDLIGFGKSSKPDLGYFFDDHVRFMDAFIEALGLEEVVLVIHDWGSALGFHWAKRNPERVKGIAFMEFIRPIPTWDEWPEFARETFQAFRTTDVGRKLIIDQNVFIEGTLPMGVVRPLTEVEMDHYREPFLNPVDREPLWRFANELPIAGEPANIVALVEEYMDWLHQSPVPKLLFWGTPGVLIPPAEAARLAKSLPNCKAVDIGPGLNLLQEDNPDLIGSEIARWLSTLEISGGSGGSGGGGSGGMVFTLEDFVGDWEQTAAYNLDQVLEQGGVSSLLQNLAVSVTPIQRIVRSGENALKIDIHVIIPYEGLSADQMAQIEEVFKVVYPVDDHHFKVILPYGTLVIDGVTPNMLNYFGRPYEGIAVFDGKKITVTGTLWNGNKIIDERLITPDGSMLFRVTINS

SEQ ID NO: 3329 - protein, 448 aa, Synthetic construct
MFHYVDVGPRDGTPVLFLHGNPTSSYVWRNIIPHVAPTHRCIAPDLIGMGKSSKPDLGYFFDDHVRFMDAFIEALGLEEVVLVIHDWGSALGFHWAKRNPERVKGIAFMEFIRPIPTWDEWPEFAREMFQAFRTTDVGRKLIIDQNVFIEGTLPMGVVRPLTEVEMDHYREPFLNPVDREPLWRFANELPIAGEPANIVALVEEYMDWLHQSPVPKLLFWGTPGVLIPPAEAARLAKSLPNCKAVDIGPGLNLLQEDNPDLIGSEIARWLSTLEISGGSGGSGGGGSGGMVFTLEDFVGDWEQTAAYNLDQVLEQGGVSSLLQNLAVSVTPIQRIVRSGENALKIDIHVIIPYEGLSADQMAQIEEVFKVVYPVDDHHFKVILPYGTLVIDGVTPNMLNYFGRPYEGIAVFDGKKITVTGTLWNGNKIIDERLITPDGSMLFRVTINS

SEQ ID NO: 3330 - protein, 448 aa, Synthetic construct
MFHYVDVGPRDGTPVLFLHGNPTSSYVWRNIIPHVAPTHRCIAPDLIGMGKSSKPDLGYFFDDHVRFMDAFIEALGLEEVVLVIHDWGSALGFHWAKRNPERVKGIAFMEFIRPIPTWDEWPEFARETFQAFRTTDVGRKLIIDQNVMIEGTLPMGVVRPLTEVEMDHYREPFLNPVDREPLWRFANELPIAGEPANIVALVEEYMDWLHQSPVPKLLFWGTPGVLIPPAEAARLAKSLPNCKAVDIGPGLNLLQEDNPDLIGSEIARWLSTLEISGGSGGSGGGGSGGMVFTLEDFVGDWEQTAAYNLDQVLEQGGVSSLLQNLAVSVTPIQRIVRSGENALKIDIHVIIPYEGLSADQMAQIEEVFKVVYPVDDHHFKVILPYGTLVIDGVTPNMLNYFGRPYEGIAVFDGKKITVTGTLWNGNKIIDERLITPDGSMLFRVTINS

SEQ ID NO: 3331 - protein, 448 aa, Synthetic construct
MFHYVDVGPRDGTPVLFLHGNPTSSYVWRNIIPHVAPTHRCIAPDLIGFGKSSKPDLGYFFDDHVRFMDAFIEALGLEEVVLVIHDWGSALGFHWAKRNPERVKGIAFMEFIRPIPTWDEWPEFARETFQAFRTTDVGRKLIIDQNVFIEGTLPMGVVRPLTEVEMDHYREPFLNPVDREPLWRFPNELPIAGEPANIVALVEEYMDWLHQSPVPKLLFWGTPGVLIPPAEAARLAKSLPNCKAVDIGPGLNILQEDNPDLIGSEIARWLSTLEISGGSGGSGGGGSGGMVFTLEDFVGDWEQTAAYNLDQVLEQGGVSSLLQNLAVSVTPIQRIVRSGENALKIDIHVIIPYEGLSADQMAQIEEVFKVVYPVDDHHFKVILPYGTLVIDGVTPNMLNYFGRPYEGIAVFDGKKITVTGTLWNGNKIIDERLITPDGSMLFRVTINS

SEQ ID NO: 3332 - protein, 448 aa, Synthetic construct
MFHYVDVGPRDGTPVLFLHGNPTSSYVWRNIIPHVAPTHRCIAPDLIGMGKSSKPDIGYFFDDHVRFMDAFIEALGLEEVVLVIHDWGSALGFHWAKRNPERVKGIAFMEFIRPIPTWDEWPEFARETFQAFRTTDVGRKLIIDQNVFIEGTLPMGVVRPLTEVEMDHYREPFLNPVDREPLWRFPNELPIAGEPANIVALVEEYMDWLHQSPVPKLLFWGTPGVLIPPAEAARLAKSLPNCKAVDIGPGLNILQEDNPDLIGSEIARWLSTLEISGGSGGSGGGGSGGMVFTLEDFVGDWEQTAAYNLDQVLEQGGVSSLLQNLAVSVTPIQRIVRSGENALKIDIHVIIPYEGLSADQMAQIEEVFKVVYPVDDHHFKVILPYGTLVIDGVTPNMLNYFGRPYEGIAVFDGKKITVTGTLWNGNKIIDERLITPDGSMLFRVTINS

SEQ ID NO: 3333 - protein, 448 aa, Synthetic construct
MFHYVDVGPRDGTPVLFLHGNPTSSYVWRNIIPHVAPTHRCIAPDLIGMGKSSKPDLGYFFDDHVRFMDAFIEALGLEEVVLVIHDWGSALGFHWAKRNPERVKGIAFMEFIRPIPTWDEWPEFAREMFQAFRTTDVGRKLIIDQNVFIEGTLPMGVVRPLTEVEMDHYREPFLNPVDREPLWRFPNELPIAGEPANIVALVEEYMDWLHQSPVPKLLFWGTPGVLIPPAEAARLAKSLPNCKAVDIGPGLNILQEDNPDLIGSEIARWLSTLEISGGSGGSGGGGSGGMVFTLEDFVGDWEQTAAYNLDQVLEQGGVSSLLQNLAVSVTPIQRIVRSGENALKIDIHVIIPYEGLSADQMAQIEEVFKVVYPVDDHHFKVILPYGTLVIDGVTPNMLNYFGRPYEGIAVFDGKKITVTGTLWNGNKIIDERLITPDGSMLFRVTINS

SEQ ID NO: 3334 - protein, 448 aa, Synthetic construct
MFHYVDVGPRDGTPVLFLHGNPTSSYVWRNIIPHVAPTHRCIAPDLIGMGKSSKPDLGYFFDDHVRFMDAFIEALGLEEVVLVIHDWGSALGFHWAKRNPERVKGIAFMEFIRPIPTWDEWPEFARETFQAFRTTDVGRKLIIDQNVMIEGTLPMGVVRPLTEVEMDHYREPFLNPVDREPLWRFPNELPIAGEPANIVALVEEYMDWLHQSPVPKLLFWGTPGVLIPPAEAARLAKSLPNCKAVDIGPGLNILQEDNPDLIGSEIARWLSTLEISGGSGGSGGGGSGGMVFTLEDFVGDWEQTAAYNLDQVLEQGGVSSLLQNLAVSVTPIQRIVRSGENALKIDIHVIIPYEGLSADQMAQIEEVFKVVYPVDDHHFKVILPYGTLVIDGVTPNMLNYFGRPYEGIAVFDGKKITVTGTLWNGNKIIDERLITPDGSMLFRVTINS

SEQ ID NO: 3335 - protein, 448 aa, Synthetic construct
MFHYVDVGPRDGTPVLFLHGNPTSSYVWRNIIPHVAPTHRCIAPDLIGMGKSSKPDLGYFFDDHVRFMDAFIEALGLEEVVLVIHDWGSALGFHWAKRNPERVKGIAFMEFIRPIPTWDEWPEFARETFQAFRTTDVGRKLIIDQNVFIEGTLPMGVVRPLTEVEMDHYREPFLNPEDREPLWRFPNELPIAGEPANIVALVEEYMDWLHQSPVPKLLFWGTPGVLIPPAEAARLAKSLPNCKAVDIGPGLNILQEDNPDLIGSEIARWLSTLEISGGSGGSGGGGSGGMVFTLEDFVGDWEQTAAYNLDQVLEQGGVSSLLQNLAVSVTPIQRIVRSGENALKIDIHVIIPYEGLSADQMAQIEEVFKVVYPVDDHHFKVILPYGTLVIDGVTPNMLNYFGRPYEGIAVFDGKKITVTGTLWNGNKIIDERLITPDGSMLFRVTINS

SEQ ID NO: 3336 - protein, 448 aa, Synthetic construct
MFHYVDVGPRDGTPVLFLHGNPTSSYVWRNIIPHVAPTHRCIAPDLIGMGKSSKPDLGYFFDDHVRFMDAFIEALGLEEVVLVIHDWGSALGFHWAKRNPERVKGIAFMEFIRPIPTWDEWPEFARETFQAFRTTDVGRKLIIDQNVFIEGTLPMGVVRPLTEVEMDHYREPFLNPVDREPLWRFANELPIAGEPANIVALVEEYMDWLHQSPVPKLLFWGTPGVLIPPAEAARLAKSLPNCKAVDIGPGLNILQEDNPDLIGSEIARWLSTLEISGGSGGSGGGGSGGMVFTLEDFVGDWEQTAAYNLDQVLEQGGVSSLLQNLAVSVTPIQRIVRSGENALKIDIHVIIPYEGLSADQMAQIEEVFKVVYPVDDHHFKVILPYGTLVIDGVTPNMLNYFGRPYEGIAVFDGKKITVTGTLWNGNKIIDERLITPDGSMLFRVTINS

SEQ ID NO: 3337 - protein, 448 aa, Synthetic construct
MFHYVDVGPRDGTPVLFLHGNPTSSYVWRNIIPHVAPTHRCIAPDLIGFGKSGKPDIGYFFDDHVRFMDAFIEALGLEEVVLVIHDWGAALGFHWAKRNPERVKGIAFMEFIRPIPTWDEWPEFARETFQAFRTTDVGRKLIIDQNVFIEGTLPMGVVRPLTEVEMDHYREPFLNPVDREPLWRFPNELPIAGEPANIVALVEEYMDWLHQSPVPKLLFWGTPGVLIPPAEAARLAKSLPNCKAVDIGPGLNLLQEDNPDLIGSEIARWLSTLEISGGSGGSGGGGSGGMVFTLEDFVGDWEQTAAYNLDQVLEQGGVSSLLQNLAVSVTPIQRIVRSGENALKIDIHVIIPYEGLSADQMAQIEEVFKVVYPVDDHHFKVILPYGTLVIDGVTPNMLNYFGRPYEGIAVFDGKKITVTGTLWNGNKIIDERLITPDGSMLFRVTINS

SEQ ID NO: 3338 - protein, 448 aa, Synthetic construct
MFHYVDVGPRDGTPVLFLHGNPTSSYVWRNIIPHVAPTHRCIAPDLIGFGKSGKPDIGYFFDDHVRFMDAFIEALGLEEVVLVIHDWGSALGFHWAKRNPERVKGIAFMEFIRPIPTWDEWPEFARETFQAFRTTDVGRKLIIDQNVFIEGTLPMGVVRPLTEVEMDHYREPFLNPQDREPLWRFPNELPIAGEPANIVALVEEYMDWLHQSPVPKLLFWGTPGVLIPPAEAARLAKSLPNCKAVDIGPGLNLLQEDNPDLIGSEIARWLSTLEISGGSGGSGGGGSGGMVFTLEDFVGDWEQTAAYNLDQVLEQGGVSSLLQNLAVSVTPIQRIVRSGENALKIDIHVIIPYEGLSADQMAQIEEVFKVVYPVDDHHFKVILPYGTLVIDGVTPNMLNYFGRPYEGIAVFDGKKITVTGTLWNGNKIIDERLITPDGSMLFRVTINS

SEQ ID NO: 3339 - protein, 448 aa, Synthetic construct
MFHYVDVGPRDGTPVLFLHGNPTSSYVWRNIIPHVAPTHRCIAPDLIGFGKSGKPDIGYFFDDHVRFMDAFIEALGLEEVVLVIHDWGSALGFHWAKRNPERVKGIAFMEFIRPIPTWDEWPEFAREMFQAFRTTDVGRKLIIDQNVFIEGTLPMGVVRPLTEVEMDHYREPFLNPVDREPLWRFPNELPIAGEPANIVALVEEYMDWLHQSPVPKLLFWGTPGVLIPPAEAARLAKSLPNCKAVDIGPGLNLLQEDNPDLIGSEIARWLSTLEISGGSGGSGGGGSGGMVFTLEDFVGDWEQTAAYNLDQVLEQGGVSSLLQNLAVSVTPIQRIVRSGENALKIDIHVIIPYEGLSADQMAQIEEVFKVVYPVDDHHFKVILPYGTLVIDGVTPNMLNYFGRPYEGIAVFDGKKITVTGTLWNGNKIIDERLITPDGSMLFRVTINS

SEQ ID NO: 3340 - protein, 448 aa, Synthetic construct
MFHYVDVGPRDGTPVLFLHGNPTSSYVWRNIIPHVAPTHRCIAPDLIGFGKSGKPDLGYFFDDHVRFMDAFIEALGLEEVVLVIHDWGAALGFHWAKRNPERVKGIAFMEFIRPIPTWDEWPEFAREMFQAFRTTDVGRKLIIDQNVFIEGTLPMGVVRPLTEVEMDHYREPFLNPVDREPLWRFPNELPIAGEPANIVALVEEYMDWLHQSPVPKLLFWGTPGVLIPPAEAARLAKSLPNCKAVDIGPGLNLLQEDNPDLIGSEIARWLSTLEISGGSGGSGGGGSGGMVFTLEDFVGDWEQTAAYNLDQVLEQGGVSSLLQNLAVSVTPIQRIVRSGENALKIDIHVIIPYEGLSADQMAQIEEVFKVVYPVDDHHFKVILPYGTLVIDGVTPNMLNYFGRPYEGIAVFDGKKITVTGTLWNGNKIIDERLITPDGSMLFRVTINS

SEQ ID NO: 3341 - protein, 448 aa, Synthetic construct
MFHYVDVGPRDGTPVLFLHGNPTSSYVWRNIIPHVAPTHRCIAPDLIGFGKSGKPDLGYFFDDHVRFMDAFIEALGLEEVVLVIHDWGSALGFHWAKRNPERVKGIAFMEFIRPIPTWDEWPEFAREMFQAFRTTDVGRKLIIDQNVFIEGTLPMGVVRPLTEVEMDHYREPFLNPQDREPLWRFPNELPIAGEPANIVALVEEYMDWLHQSPVPKLLFWGTPGVLIPPAEAARLAKSLPNCKAVDIGPGLNLLQEDNPDLIGSEIARWLSTLEISGGSGGSGGGGSGGMVFTLEDFVGDWEQTAAYNLDQVLEQGGVSSLLQNLAVSVTPIQRIVRSGENALKIDIHVIIPYEGLSADQMAQIEEVFKVVYPVDDHHFKVILPYGTLVIDGVTPNMLNYFGRPYEGIAVFDGKKITVTGTLWNGNKIIDERLITPDGSMLFRVTINS

SEQ ID NO: 3342 - protein, 448 aa, Synthetic construct
MFHYVDVGPRDGTPVLFLHGNPTSSYVWRNIIPHVAPTHRCIAPDLIGFGKSGKPDIGYFFDDHVRFMDAFIEALGLEEVVLVIHDWGSALGFHWAKRNPERVKGIAFMEFIRPIPTWDEWPEFARETFQAFRTTDVGRKLIIDQNVMIEGTLPMGVVRPLTEVEMDHYREPFLNPVDREPLWRFPNELPIAGEPANIVALVEEYMDWLHQSPVPKLLFWGTPGVLIPPAEAARLAKSLPNCKAVDIGPGLNLLQEDNPDLIGSEIARWLSTLEISGGSGGSGGGGSGGMVFTLEDFVGDWEQTAAYNLDQVLEQGGVSSLLQNLAVSVTPIQRIVRSGENALKIDIHVIIPYEGLSADQMAQIEEVFKVVYPVDDHHFKVILPYGTLVIDGVTPNMLNYFGRPYEGIAVFDGKKITVTGTLWNGNKIIDERLITPDGSMLFRVTINS

SEQ ID NO: 3343 - protein, 448 aa, Synthetic construct
MFHYVDVGPRDGTPVLFLHGNPTSSYVWRNIIPHVAPTHRCIAPDLIGFGKSGKPDLGYFFDDHVRFMDAFIEALGLEEVVLVIHDWGAALGFHWAKRNPERVKGIAFMEFIRPIPTWDEWPEFARETFQAFRTTDVGRKLIIDQNVMIEGTLPMGVVRPLTEVEMDHYREPFLNPVDREPLWRFPNELPIAGEPANIVALVEEYMDWLHQSPVPKLLFWGTPGVLIPPAEAARLAKSLPNCKAVDIGPGLNLLQEDNPDLIGSEIARWLSTLEISGGSGGSGGGGSGGMVFTLEDFVGDWEQTAAYNLDQVLEQGGVSSLLQNLAVSVTPIQRIVRSGENALKIDIHVIIPYEGLSADQMAQIEEVFKVVYPVDDHHFKVILPYGTLVIDGVTPNMLNYFGRPYEGIAVFDGKKITVTGTLWNGNKIIDERLITPDGSMLFRVTINS

SEQ ID NO: 3344 - protein, 448 aa, Synthetic construct
MFHYVDVGPRDGTPVLFLHGNPTSSYVWRNIIPHVAPTHRCIAPDLIGFGKSGKPDLGYFFDDHVRFMDAFIEALGLEEVVLVIHDWGSALGFHWAKRNPERVKGIAFMEFIRPIPTWDEWPEFARETFQAFRTTDVGRKLIIDQNVMIEGTLPMGVVRPLTEVEMDHYREPFLNPQDREPLWRFPNELPIAGEPANIVALVEEYMDWLHQSPVPKLLFWGTPGVLIPPAEAARLAKSLPNCKAVDIGPGLNLLQEDNPDLIGSEIARWLSTLEISGGSGGSGGGGSGGMVFTLEDFVGDWEQTAAYNLDQVLEQGGVSSLLQNLAVSVTPIQRIVRSGENALKIDIHVIIPYEGLSADQMAQIEEVFKVVYPVDDHHFKVILPYGTLVIDGVTPNMLNYFGRPYEGIAVFDGKKITVTGTLWNGNKIIDERLITPDGSMLFRVTINS

SEQ ID NO: 3345 - protein, 448 aa, Synthetic construct
MFHYVDVGPRDGTPVLFLHGNPTSSYVWRNIIPHVAPTHRCIAPDLIGFGKSGKPDIGYFFDDHVRFMDAFIEALGLEEVVLVIHDWGSALGFHWAKRNPERVKGIAFMEFIRPIPTWDEWPEFARETFQAFRTTDVGRKLIIDQNVFIEGTLPMGVVRPLTEVEMDHYREPFLNPEDREPLWRFPNELPIAGEPANIVALVEEYMDWLHQSPVPKLLFWGTPGVLIPPAEAARLAKSLPNCKAVDIGPGLNLLQEDNPDLIGSEIARWLSTLEISGGSGGSGGGGSGGMVFTLEDFVGDWEQTAAYNLDQVLEQGGVSSLLQNLAVSVTPIQRIVRSGENALKIDIHVIIPYEGLSADQMAQIEEVFKVVYPVDDHHFKVILPYGTLVIDGVTPNMLNYFGRPYEGIAVFDGKKITVTGTLWNGNKIIDERLITPDGSMLFRVTINS

SEQ ID NO: 3346 - protein, 448 aa, Synthetic construct
MFHYVDVGPRDGTPVLFLHGNPTSSYVWRNIIPHVAPTHRCIAPDLIGFGKSGKPDLGYFFDDHVRFMDAFIEALGLEEVVLVIHDWGAALGFHWAKRNPERVKGIAFMEFIRPIPTWDEWPEFARETFQAFRTTDVGRKLIIDQNVFIEGTLPMGVVRPLTEVEMDHYREPFLNPEDREPLWRFPNELPIAGEPANIVALVEEYMDWLHQSPVPKLLFWGTPGVLIPPAEAARLAKSLPNCKAVDIGPGLNLLQEDNPDLIGSEIARWLSTLEISGGSGGSGGGGSGGMVFTLEDFVGDWEQTAAYNLDQVLEQGGVSSLLQNLAVSVTPIQRIVRSGENALKIDIHVIIPYEGLSADQMAQIEEVFKVVYPVDDHHFKVILPYGTLVIDGVTPNMLNYFGRPYEGIAVFDGKKITVTGTLWNGNKIIDERLITPDGSMLFRVTINS

SEQ ID NO: 3347 - protein, 448 aa, Synthetic construct
MFHYVDVGPRDGTPVLFLHGNPTSSYVWRNIIPHVAPTHRCIAPDLIGFGKSGKPDIGYFFDDHVRFMDAFIEALGLEEVVLVIHDWGSALGFHWAKRNPERVKGIAFMEFIRPIPTWDEWPEFARETFQAFRTTDVGRKLIIDQNVFIEGTLPMGVVRPLTEVEMDHYREPFLNPVDREPLWRFANELPIAGEPANIVALVEEYMDWLHQSPVPKLLFWGTPGVLIPPAEAARLAKSLPNCKAVDIGPGLNLLQEDNPDLIGSEIARWLSTLEISGGSGGSGGGGSGGMVFTLEDFVGDWEQTAAYNLDQVLEQGGVSSLLQNLAVSVTPIQRIVRSGENALKIDIHVIIPYEGLSADQMAQIEEVFKVVYPVDDHHFKVILPYGTLVIDGVTPNMLNYFGRPYEGIAVFDGKKITVTGTLWNGNKIIDERLITPDGSMLFRVTINS

SEQ ID NO: 3348 - protein, 448 aa, Synthetic construct
MFHYVDVGPRDGTPVLFLHGNPTSSYVWRNIIPHVAPTHRCIAPDLIGFGKSGKPDLGYFFDDHVRFMDAFIEALGLEEVVLVIHDWGAALGFHWAKRNPERVKGIAFMEFIRPIPTWDEWPEFARETFQAFRTTDVGRKLIIDQNVFIEGTLPMGVVRPLTEVEMDHYREPFLNPVDREPLWRFANELPIAGEPANIVALVEEYMDWLHQSPVPKLLFWGTPGVLIPPAEAARLAKSLPNCKAVDIGPGLNLLQEDNPDLIGSEIARWLSTLEISGGSGGSGGGGSGGMVFTLEDFVGDWEQTAAYNLDQVLEQGGVSSLLQNLAVSVTPIQRIVRSGENALKIDIHVIIPYEGLSADQMAQIEEVFKVVYPVDDHHFKVILPYGTLVIDGVTPNMLNYFGRPYEGIAVFDGKKITVTGTLWNGNKIIDERLITPDGSMLFRVTINS

SEQ ID NO: 3349 - protein, 448 aa, Synthetic construct
MFHYVDVGPRDGTPVLFLHGNPTSSYVWRNIIPHVAPTHRCIAPDLIGFGKSGKPDLGYFFDDHVRFMDAFIEALGLEEVVLVIHDWGSALGFHWAKRNPERVKGIAFMEFIRPIPTWDEWPEFARETFQAFRTTDVGRKLIIDQNVFIEGTLPMGVVRPLTEVEMDHYREPFLNPQDREPLWRFANELPIAGEPANIVALVEEYMDWLHQSPVPKLLFWGTPGVLIPPAEAARLAKSLPNCKAVDIGPGLNLLQEDNPDLIGSEIARWLSTLEISGGSGGSGGGGSGGMVFTLEDFVGDWEQTAAYNLDQVLEQGGVSSLLQNLAVSVTPIQRIVRSGENALKIDIHVIIPYEGLSADQMAQIEEVFKVVYPVDDHHFKVILPYGTLVIDGVTPNMLNYFGRPYEGIAVFDGKKITVTGTLWNGNKIIDERLITPDGSMLFRVTINS

SEQ ID NO: 3350 - protein, 448 aa, Synthetic construct
MFHYVDVGPRDGTPVLFLHGNPTSSYVWRNIIPHVAPTHRCIAPDLIGFGKSSKPPIGYFFDDHVRFMDAFIEALGLEEVVLVIHDWGSALGFHWAKRNPERVKGIAFMEFIRPIPTWDEWPEFARETFQAFRTTDVGRKLIIDQNVFIEGTLPMGVVRPLTEVEMDHYREPFLNPVDREPLWRFPNELPIAGEPANIVALVEEYMDWLHQSPVPKLLFWGTPGVLIPPAEAARLAKSLPNCKAVDIGPGLNLLQEDNPDLIGSEIARWLSTLEISGGSGGSGGGGSGGMVFTLEDFVGDWEQTAAYNLDQVLEQGGVSSLLQNLAVSVTPIQRIVRSGENALKIDIHVIIPYEGLSADQMAQIEEVFKVVYPVDDHHFKVILPYGTLVIDGVTPNMLNYFGRPYEGIAVFDGKKITVTGTLWNGNKIIDERLITPDGSMLFRVTINS

SEQ ID NO: 3351 - protein, 448 aa, Synthetic construct
MFHYVDVGPRDGTPVLFLHGNPTSSYVWRNIIPHVAPTHRCIAPDLIGFGKSSKPPLGYFFDDHVRFMDAFIEALGLEEVVLVIHDWGAALGFHWAKRNPERVKGIAFMEFIRPIPTWDEWPEFARETFQAFRTTDVGRKLIIDQNVFIEGTLPMGVVRPLTEVEMDHYREPFLNPVDREPLWRFPNELPIAGEPANIVALVEEYMDWLHQSPVPKLLFWGTPGVLIPPAEAARLAKSLPNCKAVDIGPGLNLLQEDNPDLIGSEIARWLSTLEISGGSGGSGGGGSGGMVFTLEDFVGDWEQTAAYNLDQVLEQGGVSSLLQNLAVSVTPIQRIVRSGENALKIDIHVIIPYEGLSADQMAQIEEVFKVVYPVDDHHFKVILPYGTLVIDGVTPNMLNYFGRPYEGIAVFDGKKITVTGTLWNGNKIIDERLITPDGSMLFRVTINS

SEQ ID NO: 3352 - protein, 448 aa, Synthetic construct
MFHYVDVGPRDGTPVLFLHGNPTSSYVWRNIIPHVAPTHRCIAPDLIGFGKSSKPPLGYFFDDHVRFMDAFIEALGLEEVVLVIHDWGSALGFHWAKRNPERVKGIAFMEFIRPIPTWDEWPEFARETFQAFRTTDVGRKLIIDQNVFIEGTLPMGVVRPLTEVEMDHYREPFLNPQDREPLWRFPNELPIAGEPANIVALVEEYMDWLHQSPVPKLLFWGTPGVLIPPAEAARLAKSLPNCKAVDIGPGLNLLQEDNPDLIGSEIARWLSTLEISGGSGGSGGGGSGGMVFTLEDFVGDWEQTAAYNLDQVLEQGGVSSLLQNLAVSVTPIQRIVRSGENALKIDIHVIIPYEGLSADQMAQIEEVFKVVYPVDDHHFKVILPYGTLVIDGVTPNMLNYFGRPYEGIAVFDGKKITVTGTLWNGNKIIDERLITPDGSMLFRVTINS

SEQ ID NO: 3353 - protein, 448 aa, Synthetic construct
MFHYVDVGPRDGTPVLFLHGNPTSSYVWRNIIPHVAPTHRCIAPDLIGFGKSSKPDIGYFFDDHVRFMDAFIEALGLEEVVLVIHDWGAALGFHWAKRNPERVKGIAFMEFIRPIPTWDEWPEFARETFQAFRTTDVGRKLIIDQNVFIEGTLPMGVVRPLTEVEMDHYREPFLNPVDREPLWRFPNELPIAGEPANIVALVEEYMDWLHQSPVPKLLFWGTPGVLIPPAEAARLAKSLPNCKAVDIGPGLNLLQEDNPDLIGSEIARWLSTLEISGGSGGSGGGGSGGMVFTLEDFVGDWEQTAAYNLDQVLEQGGVSSLLQNLAVSVTPIQRIVRSGENALKIDIHVIIPYEGLSADQMAQIEEVFKVVYPVDDHHFKVILPYGTLVIDGVTPNMLNYFGRPYEGIAVFDGKKITVTGTLWNGNKIIDERLITPDGSMLFRVTINS

SEQ ID NO: 3354 - protein, 448 aa, Synthetic construct
MFHYVDVGPRDGTPVLFLHGNPTSSYVWRNIIPHVAPTHRCIAPDLIGFGKSSKPDIGYFFDDHVRFMDAFIEALGLEEVVLVIHDWGSALGFHWAKRNPERVKGIAFMEFIRPIPTWDEWPEFARETFQAFRTTDVGRKLIIDQNVFIEGTLPMGVVRPLTEVEMDHYREPFLNPQDREPLWRFPNELPIAGEPANIVALVEEYMDWLHQSPVPKLLFWGTPGVLIPPAEAARLAKSLPNCKAVDIGPGLNLLQEDNPDLIGSEIARWLSTLEISGGSGGSGGGGSGGMVFTLEDFVGDWEQTAAYNLDQVLEQGGVSSLLQNLAVSVTPIQRIVRSGENALKIDIHVIIPYEGLSADQMAQIEEVFKVVYPVDDHHFKVILPYGTLVIDGVTPNMLNYFGRPYEGIAVFDGKKITVTGTLWNGNKIIDERLITPDGSMLFRVTINS

SEQ ID NO: 3355 - protein, 448 aa, Synthetic construct
MFHYVDVGPRDGTPVLFLHGNPTSSYVWRNIIPHVAPTHRCIAPDLIGFGKSSKPDLGYFFDDHVRFMDAFIEALGLEEVVLVIHDWGAALGFHWAKRNPERVKGIAFMEFIRPIPTWDEWPEFARETFQAFRTTDVGRKLIIDQNVFIEGTLPMGVVRPLTEVEMDHYREPFLNPQDREPLWRFPNELPIAGEPANIVALVEEYMDWLHQSPVPKLLFWGTPGVLIPPAEAARLAKSLPNCKAVDIGPGLNLLQEDNPDLIGSEIARWLSTLEISGGSGGSGGGGSGGMVFTLEDFVGDWEQTAAYNLDQVLEQGGVSSLLQNLAVSVTPIQRIVRSGENALKIDIHVIIPYEGLSADQMAQIEEVFKVVYPVDDHHFKVILPYGTLVIDGVTPNMLNYFGRPYEGIAVFDGKKITVTGTLWNGNKIIDERLITPDGSMLFRVTINS

SEQ ID NO: 3356 - protein, 448 aa, Synthetic construct
MFHYVDVGPRDGTPVLFLHGNPTSSYVWRNIIPHVAPTHRCIAPDLIGFGKSSKPDIGYFFDDHVRFMDAFIEALGLEEVVLVIHDWGSALGFHWAKRNPERVKGIAFMEFIRPIPTWDEWPEFARETFQAFRTTDVGRKLIIDQNVFIEGTLPMGVVRPLTEVEMDHYREPFLNPEDREPLWRFPNELPIAGEPANIVALVEEYMDWLHQSPVPKLLFWGTPGVLIPPAEAARLAKSLPNCKAVDIGPGLNLLQEDNPDLIGSEIARWLSTLEISGGSGGSGGGGSGGMVFTLEDFVGDWEQTAAYNLDQVLEQGGVSSLLQNLAVSVTPIQRIVRSGENALKIDIHVIIPYEGLSADQMAQIEEVFKVVYPVDDHHFKVILPYGTLVIDGVTPNMLNYFGRPYEGIAVFDGKKITVTGTLWNGNKIIDERLITPDGSMLFRVTINS

SEQ ID NO: 3357 - protein, 448 aa, Synthetic construct
MFHYVDVGPRDGTPVLFLHGNPTSSYVWRNIIPHVAPTHRCIAPDLIGFGKSSKPDLGYFFDDHVRFMDAFIEALGLEEVVLVIHDWGAALGFHWAKRNPERVKGIAFMEFIRPIPTWDEWPEFARETFQAFRTTDVGRKLIIDQNVFIEGTLPMGVVRPLTEVEMDHYREPFLNPEDREPLWRFPNELPIAGEPANIVALVEEYMDWLHQSPVPKLLFWGTPGVLIPPAEAARLAKSLPNCKAVDIGPGLNLLQEDNPDLIGSEIARWLSTLEISGGSGGSGGGGSGGMVFTLEDFVGDWEQTAAYNLDQVLEQGGVSSLLQNLAVSVTPIQRIVRSGENALKIDIHVIIPYEGLSADQMAQIEEVFKVVYPVDDHHFKVILPYGTLVIDGVTPNMLNYFGRPYEGIAVFDGKKITVTGTLWNGNKIIDERLITPDGSMLFRVTINS

SEQ ID NO: 3358 - protein, 448 aa, Synthetic construct
MFHYVDVGPRDGTPVLFLHGNPTSSYVWRNIIPHVAPTHRCIAPDLIGFGKSSKPDIGYFFDDHVRFMDAFIEALGLEEVVLVIHDWGSALGFHWAKRNPERVKGIAFMEFIRPIPTWDEWPEFARETFQAFRTTDVGRKLIIDQNVFIEGTLPMGVVRPLTEVEMDHYREPFLNPVDREPLWRFANELPIAGEPANIVALVEEYMDWLHQSPVPKLLFWGTPGVLIPPAEAARLAKSLPNCKAVDIGPGLNLLQEDNPDLIGSEIARWLSTLEISGGSGGSGGGGSGGMVFTLEDFVGDWEQTAAYNLDQVLEQGGVSSLLQNLAVSVTPIQRIVRSGENALKIDIHVIIPYEGLSADQMAQIEEVFKVVYPVDDHHFKVILPYGTLVIDGVTPNMLNYFGRPYEGIAVFDGKKITVTGTLWNGNKIIDERLITPDGSMLFRVTINS

SEQ ID NO: 3359 - protein, 448 aa, Synthetic construct
MFHYVDVGPRDGTPVLFLHGNPTSSYVWRNIIPHVAPTHRCIAPDLIGFGKSSKPDLGYFFDDHVRFMDAFIEALGLEEVVLVIHDWGAALGFHWAKRNPERVKGIAFMEFIRPIPTWDEWPEFARETFQAFRTTDVGRKLIIDQNVFIEGTLPMGVVRPLTEVEMDHYREPFLNPVDREPLWRFANELPIAGEPANIVALVEEYMDWLHQSPVPKLLFWGTPGVLIPPAEAARLAKSLPNCKAVDIGPGLNLLQEDNPDLIGSEIARWLSTLEISGGSGGSGGGGSGGMVFTLEDFVGDWEQTAAYNLDQVLEQGGVSSLLQNLAVSVTPIQRIVRSGENALKIDIHVIIPYEGLSADQMAQIEEVFKVVYPVDDHHFKVILPYGTLVIDGVTPNMLNYFGRPYEGIAVFDGKKITVTGTLWNGNKIIDERLITPDGSMLFRVTINS

SEQ ID NO: 3360 - protein, 448 aa, Synthetic construct
MFHYVDVGPRDGTPVLFLHGNPTSSYVWRNIIPHVAPTHRCIAPDLIGFGKSSKPDLGYFFDDHVRFMDAFIEALGLEEVVLVIHDWGSALGFHWAKRNPERVKGIAFMEFIRPIPTWDEWPEFARETFQAFRTTDVGRKLIIDQNVFIEGTLPMGVVRPLTEVEMDHYREPFLNPQDREPLWRFANELPIAGEPANIVALVEEYMDWLHQSPVPKLLFWGTPGVLIPPAEAARLAKSLPNCKAVDIGPGLNLLQEDNPDLIGSEIARWLSTLEISGGSGGSGGGGSGGMVFTLEDFVGDWEQTAAYNLDQVLEQGGVSSLLQNLAVSVTPIQRIVRSGENALKIDIHVIIPYEGLSADQMAQIEEVFKVVYPVDDHHFKVILPYGTLVIDGVTPNMLNYFGRPYEGIAVFDGKKITVTGTLWNGNKIIDERLITPDGSMLFRVTINS

SEQ ID NO: 3361 - protein, 448 aa, Synthetic construct
MFHYVDVGPRDGTPVLFLHGNPTSSYVWRNIIPHVAPTHRCIAPDLIGFGKSSKPDIGYFFDDHVRFMDAFIEALGLEEVVLVIHDWGSALGFHWAKRNPERVKGIAFMEFIRPIPTWDEWPEFARETFQAFRTTDVGRKLIIDQNVFIEGTLPMGVVRPLTEVEMDHYREPFLNPVDREPLWRFPNELPIAGEPANIVALVEEYMDWLHQSPVPKLLFWGTPGVLIPPAEAARLAKSLPNCKAVDIGPGLNILQEDNPDLIGSEIARWLSTLEISGGSGGSGGGGSGGMVFTLEDFVGDWEQTAAYNLDQVLEQGGVSSLLQNLAVSVTPIQRIVRSGENALKIDIHVIIPYEGLSADQMAQIEEVFKVVYPVDDHHFKVILPYGTLVIDGVTPNMLNYFGRPYEGIAVFDGKKITVTGTLWNGNKIIDERLITPDGSMLFRVTINS

SEQ ID NO: 3362 - protein, 448 aa, Synthetic construct
MFHYVDVGPRDGTPVLFLHGNPTSSYVWRNIIPHVAPTHRCIAPDLIGFGKSSKPDLGYFFDDHVRFMDAFIEALGLEEVVLVIHDWGAALGFHWAKRNPERVKGIAFMEFIRPIPTWDEWPEFARETFQAFRTTDVGRKLIIDQNVFIEGTLPMGVVRPLTEVEMDHYREPFLNPVDREPLWRFPNELPIAGEPANIVALVEEYMDWLHQSPVPKLLFWGTPGVLIPPAEAARLAKSLPNCKAVDIGPGLNILQEDNPDLIGSEIARWLSTLEISGGSGGSGGGGSGGMVFTLEDFVGDWEQTAAYNLDQVLEQGGVSSLLQNLAVSVTPIQRIVRSGENALKIDIHVIIPYEGLSADQMAQIEEVFKVVYPVDDHHFKVILPYGTLVIDGVTPNMLNYFGRPYEGIAVFDGKKITVTGTLWNGNKIIDERLITPDGSMLFRVTINS

SEQ ID NO: 3363 - protein, 448 aa, Synthetic construct
MFHYVDVGPRDGTPVLFLHGNPTSSYVWRNIIPHVAPTHRCIAPDLIGFGKSSKPDLGYFFDDHVRFMDAFIEALGLEEVVLVIHDWGSALGFHWAKRNPERVKGIAFMEFIRPIPTWDEWPEFARETFQAFRTTDVGRKLIIDQNVFIEGTLPMGVVRPLTEVEMDHYREPFLNPQDREPLWRFPNELPIAGEPANIVALVEEYMDWLHQSPVPKLLFWGTPGVLIPPAEAARLAKSLPNCKAVDIGPGLNILQEDNPDLIGSEIARWLSTLEISGGSGGSGGGGSGGMVFTLEDFVGDWEQTAAYNLDQVLEQGGVSSLLQNLAVSVTPIQRIVRSGENALKIDIHVIIPYEGLSADQMAQIEEVFKVVYPVDDHHFKVILPYGTLVIDGVTPNMLNYFGRPYEGIAVFDGKKITVTGTLWNGNKIIDERLITPDGSMLFRVTINS

SEQ ID NO: 3364 - protein, 448 aa, Synthetic construct
MFHYVDVGPRDGTPVLFLHGNPTSSYVWRNIIPHVAPTHRCIAPDLIGFGKSDKPDIGYFFDDHVRFMDAFIEALGLEEVVLVIHDWGAALGFHWAKRNPERVKGIAFMEFIRPIPTWDEWPEFARETFQAFRTTDVGRKLIIDQNVFIEGTLPMGVVRPLTEVEMDHYREPFLNPQDREPLWRFPNELPIAGEPANIVALVEEYMDWLHQSPVPKLLFWGTPGVLIPPAEAARLAKSLPNCKAVDIGPGLNLLQEDNPDLIGSEIARWLSTLEISGGSGGSGGGGSGGMVFTLEDFVGDWEQTAAYNLDQVLEQGGVSSLLQNLAVSVTPIQRIVRSGENALKIDIHVIIPYEGLSADQMAQIEEVFKVVYPVDDHHFKVILPYGTLVIDGVTPNMLNYFGRPYEGIAVFDGKKITVTGTLWNGNKIIDERLITPDGSMLFRVTINS

SEQ ID NO: 3365 - protein, 448 aa, Synthetic construct
MFHYVDVGPRDGTPVLFLHGNPTSSYVWRNIIPHVAPTHRCIAPDLIGMGKSGKPDIGYFFDDHVRFMDAFIEALGLEEVVLVIHDWGAALGFHWAKRNPERVKGIAFMEFIRPIPTWDEWPEFAREMFQAFRTTDVGRKLIIDQNVFIEGTLPMGVVRPLTEVEMDHYREPFLNPVDREPLWRFPNELPIAGEPANIVALVEEYMDWLHQSPVPKLLFWGTPGVLIPPAEAARLAKSLPNCKAVDIGPGLNLLQEDNPDLIGSEIARWLSTLEISGGSGGSGGGGSGGMVFTLEDFVGDWEQTAAYNLDQVLEQGGVSSLLQNLAVSVTPIQRIVRSGENALKIDIHVIIPYEGLSADQMAQIEEVFKVVYPVDDHHFKVILPYGTLVIDGVTPNMLNYFGRPYEGIAVFDGKKITVTGTLWNGNKIIDERLITPDGSMLFRVTINS

SEQ ID NO: 3366 - protein, 448 aa, Synthetic construct
MFHYVDVGPRDGTPVLFLHGNPTSSYVWRNIIPHVAPTHRCIAPDLIGMGKSGKPDIGYFFDDHVRFMDAFIEALGLEEVVLVIHDWGAALGFHWAKRNPERVKGIAFMEFIRPIPTWDEWPEFARETFQAFRTTDVGRKLIIDQNVMIEGTLPMGVVRPLTEVEMDHYREPFLNPVDREPLWRFPNELPIAGEPANIVALVEEYMDWLHQSPVPKLLFWGTPGVLIPPAEAARLAKSLPNCKAVDIGPGLNLLQEDNPDLIGSEIARWLSTLEISGGSGGSGGGGSGGMVFTLEDFVGDWEQTAAYNLDQVLEQGGVSSLLQNLAVSVTPIQRIVRSGENALKIDIHVIIPYEGLSADQMAQIEEVFKVVYPVDDHHFKVILPYGTLVIDGVTPNMLNYFGRPYEGIAVFDGKKITVTGTLWNGNKIIDERLITPDGSMLFRVTINS

SEQ ID NO: 3367 - protein, 448 aa, Synthetic construct
MFHYVDVGPRDGTPVLFLHGNPTSSYVWRNIIPHVAPTHRCIAPDLIGMGKSGKPDIGYFFDDHVRFMDAFIEALGLEEVVLVIHDWGAALGFHWAKRNPERVKGIAFMEFIRPIPTWDEWPEFARETFQAFRTTDVGRKLIIDQNVFIEGTLPMGVVRPLTEVEMDHYREPFLNPEDREPLWRFPNELPIAGEPANIVALVEEYMDWLHQSPVPKLLFWGTPGVLIPPAEAARLAKSLPNCKAVDIGPGLNLLQEDNPDLIGSEIARWLSTLEISGGSGGSGGGGSGGMVFTLEDFVGDWEQTAAYNLDQVLEQGGVSSLLQNLAVSVTPIQRIVRSGENALKIDIHVIIPYEGLSADQMAQIEEVFKVVYPVDDHHFKVILPYGTLVIDGVTPNMLNYFGRPYEGIAVFDGKKITVTGTLWNGNKIIDERLITPDGSMLFRVTINS

SEQ ID NO: 3368 - protein, 448 aa, Synthetic construct
MFHYVDVGPRDGTPVLFLHGNPTSSYVWRNIIPHVAPTHRCIAPDLIGMGKSGKPDIGYFFDDHVRFMDAFIEALGLEEVVLVIHDWGAALGFHWAKRNPERVKGIAFMEFIRPIPTWDEWPEFARETFQAFRTTDVGRKLIIDQNVFIEGTLPMGVVRPLTEVEMDHYREPFLNPVDREPLWRFANELPIAGEPANIVALVEEYMDWLHQSPVPKLLFWGTPGVLIPPAEAARLAKSLPNCKAVDIGPGLNLLQEDNPDLIGSEIARWLSTLEISGGSGGSGGGGSGGMVFTLEDFVGDWEQTAAYNLDQVLEQGGVSSLLQNLAVSVTPIQRIVRSGENALKIDIHVIIPYEGLSADQMAQIEEVFKVVYPVDDHHFKVILPYGTLVIDGVTPNMLNYFGRPYEGIAVFDGKKITVTGTLWNGNKIIDERLITPDGSMLFRVTINS

SEQ ID NO: 3369 - protein, 448 aa, Synthetic construct
MFHYVDVGPRDGTPVLFLHGNPTSSYVWRNIIPHVAPTHRCIAPDLIGMGKSSKPPIGYFFDDHVRFMDAFIEALGLEEVVLVIHDWGAALGFHWAKRNPERVKGIAFMEFIRPIPTWDEWPEFARETFQAFRTTDVGRKLIIDQNVFIEGTLPMGVVRPLTEVEMDHYREPFLNPVDREPLWRFPNELPIAGEPANIVALVEEYMDWLHQSPVPKLLFWGTPGVLIPPAEAARLAKSLPNCKAVDIGPGLNLLQEDNPDLIGSEIARWLSTLEISGGSGGSGGGGSGGMVFTLEDFVGDWEQTAAYNLDQVLEQGGVSSLLQNLAVSVTPIQRIVRSGENALKIDIHVIIPYEGLSADQMAQIEEVFKVVYPVDDHHFKVILPYGTLVIDGVTPNMLNYFGRPYEGIAVFDGKKITVTGTLWNGNKIIDERLITPDGSMLFRVTINS

SEQ ID NO: 3370 - protein, 448 aa, Synthetic construct
MFHYVDVGPRDGTPVLFLHGNPTSSYVWRNIIPHVAPTHRCIAPDLIGMGKSSKPDIGYFFDDHVRFMDAFIEALGLEEVVLVIHDWGAALGFHWAKRNPERVKGIAFMEFIRPIPTWDEWPEFARETFQAFRTTDVGRKLIIDQNVFIEGTLPMGVVRPLTEVEMDHYREPFLNPEDREPLWRFPNELPIAGEPANIVALVEEYMDWLHQSPVPKLLFWGTPGVLIPPAEAARLAKSLPNCKAVDIGPGLNLLQEDNPDLIGSEIARWLSTLEISGGSGGSGGGGSGGMVFTLEDFVGDWEQTAAYNLDQVLEQGGVSSLLQNLAVSVTPIQRIVRSGENALKIDIHVIIPYEGLSADQMAQIEEVFKVVYPVDDHHFKVILPYGTLVIDGVTPNMLNYFGRPYEGIAVFDGKKITVTGTLWNGNKIIDERLITPDGSMLFRVTINS

SEQ ID NO: 3371 - protein, 448 aa, Synthetic construct
MFHYVDVGPRDGTPVLFLHGNPTSSYVWRNIIPHVAPTHRCIAPDLIGMGKSSKPDIGYFFDDHVRFMDAFIEALGLEEVVLVIHDWGAALGFHWAKRNPERVKGIAFMEFIRPIPTWDEWPEFARETFQAFRTTDVGRKLIIDQNVFIEGTLPMGVVRPLTEVEMDHYREPFLNPVDREPLWRFANELPIAGEPANIVALVEEYMDWLHQSPVPKLLFWGTPGVLIPPAEAARLAKSLPNCKAVDIGPGLNLLQEDNPDLIGSEIARWLSTLEISGGSGGSGGGGSGGMVFTLEDFVGDWEQTAAYNLDQVLEQGGVSSLLQNLAVSVTPIQRIVRSGENALKIDIHVIIPYEGLSADQMAQIEEVFKVVYPVDDHHFKVILPYGTLVIDGVTPNMLNYFGRPYEGIAVFDGKKITVTGTLWNGNKIIDERLITPDGSMLFRVTINS

SEQ ID NO: 3372 - protein, 448 aa, Synthetic construct
MFHYVDVGPRDGTPVLFLHGNPTSSYVWRNIIPHVAPTHRCIAPDLIGMGKSSKPDIGYFFDDHVRFMDAFIEALGLEEVVLVIHDWGAALGFHWAKRNPERVKGIAFMEFIRPIPTWDEWPEFARETFQAFRTTDVGRKLIIDQNVFIEGTLPMGVVRPLTEVEMDHYREPFLNPVDREPLWRFPNELPIAGEPANIVALVEEYMDWLHQSPVPKLLFWGTPGVLIPPAEAARLAKSLPNCKAVDIGPGLNILQEDNPDLIGSEIARWLSTLEISGGSGGSGGGGSGGMVFTLEDFVGDWEQTAAYNLDQVLEQGGVSSLLQNLAVSVTPIQRIVRSGENALKIDIHVIIPYEGLSADQMAQIEEVFKVVYPVDDHHFKVILPYGTLVIDGVTPNMLNYFGRPYEGIAVFDGKKITVTGTLWNGNKIIDERLITPDGSMLFRVTINS

SEQ ID NO: 3373 - protein, 448 aa, Synthetic construct
MFHYVDVGPRDGTPVLFLHGNPTSSYVWRNIIPHVAPTHRCIAPDLIGFGKSDKPDIGYFFDDHVRFMDAFIEALGLEEVVLVIHDWGAALGFHWAKRNPERVKGIAFMEFIRPIPTWDEWPEFARETFQAFRTTDVGRKLIIDQNVFIEGTLPMGVVRPLTEVEMDHYREPFLNPEDREPLWRFPNELPIAGEPANIVALVEEYMDWLHQSPVPKLLFWGTPGVLIPPAEAARLAKSLPNCKAVDIGPGLNLLQEDNPDLIGSEIARWLSTLEISGGSGGSGGGGSGGMVFTLEDFVGDWEQTAAYNLDQVLEQGGVSSLLQNLAVSVTPIQRIVRSGENALKIDIHVIIPYEGLSADQMAQIEEVFKVVYPVDDHHFKVILPYGTLVIDGVTPNMLNYFGRPYEGIAVFDGKKITVTGTLWNGNKIIDERLITPDGSMLFRVTINS

SEQ ID NO: 3374 - protein, 448 aa, Synthetic construct
MFHYVDVGPRDGTPVLFLHGNPTSSYVWRNIIPHVAPTHRCIAPDLIGMGKSGKPDIGYFFDDHVRFMDAFIEALGLEEVVLVIHDWGSALGFHWAKRNPERVKGIAFMEFIRPIPTWDEWPEFAREMFQAFRTTDVGRKLIIDQNVFIEGTLPMGVVRPLTEVEMDHYREPFLNPEDREPLWRFPNELPIAGEPANIVALVEEYMDWLHQSPVPKLLFWGTPGVLIPPAEAARLAKSLPNCKAVDIGPGLNLLQEDNPDLIGSEIARWLSTLEISGGSGGSGGGGSGGMVFTLEDFVGDWEQTAAYNLDQVLEQGGVSSLLQNLAVSVTPIQRIVRSGENALKIDIHVIIPYEGLSADQMAQIEEVFKVVYPVDDHHFKVILPYGTLVIDGVTPNMLNYFGRPYEGIAVFDGKKITVTGTLWNGNKIIDERLITPDGSMLFRVTINS

SEQ ID NO: 3375 - protein, 448 aa, Synthetic construct
MFHYVDVGPRDGTPVLFLHGNPTSSYVWRNIIPHVAPTHRCIAPDLIGMGKSGKPDIGYFFDDHVRFMDAFIEALGLEEVVLVIHDWGSALGFHWAKRNPERVKGIAFMEFIRPIPTWDEWPEFARETFQAFRTTDVGRKLIIDQNVMIEGTLPMGVVRPLTEVEMDHYREPFLNPEDREPLWRFPNELPIAGEPANIVALVEEYMDWLHQSPVPKLLFWGTPGVLIPPAEAARLAKSLPNCKAVDIGPGLNLLQEDNPDLIGSEIARWLSTLEISGGSGGSGGGGSGGMVFTLEDFVGDWEQTAAYNLDQVLEQGGVSSLLQNLAVSVTPIQRIVRSGENALKIDIHVIIPYEGLSADQMAQIEEVFKVVYPVDDHHFKVILPYGTLVIDGVTPNMLNYFGRPYEGIAVFDGKKITVTGTLWNGNKIIDERLITPDGSMLFRVTINS

SEQ ID NO: 3376 - protein, 448 aa, Synthetic construct
MFHYVDVGPRDGTPVLFLHGNPTSSYVWRNIIPHVAPTHRCIAPDLIGMGKSGKPDIGYFFDDHVRFMDAFIEALGLEEVVLVIHDWGSALGFHWAKRNPERVKGIAFMEFIRPIPTWDEWPEFARETFQAFRTTDVGRKLIIDQNVFIEGTLPMGVVRPLTEVEMDHYREPFLNPEDREPLWRFANELPIAGEPANIVALVEEYMDWLHQSPVPKLLFWGTPGVLIPPAEAARLAKSLPNCKAVDIGPGLNLLQEDNPDLIGSEIARWLSTLEISGGSGGSGGGGSGGMVFTLEDFVGDWEQTAAYNLDQVLEQGGVSSLLQNLAVSVTPIQRIVRSGENALKIDIHVIIPYEGLSADQMAQIEEVFKVVYPVDDHHFKVILPYGTLVIDGVTPNMLNYFGRPYEGIAVFDGKKITVTGTLWNGNKIIDERLITPDGSMLFRVTINS

SEQ ID NO: 3377 - protein, 448 aa, Synthetic construct
MFHYVDVGPRDGTPVLFLHGNPTSSYVWRNIIPHVAPTHRCIAPDLIGMGKSSKPPIGYFFDDHVRFMDAFIEALGLEEVVLVIHDWGSALGFHWAKRNPERVKGIAFMEFIRPIPTWDEWPEFARETFQAFRTTDVGRKLIIDQNVFIEGTLPMGVVRPLTEVEMDHYREPFLNPEDREPLWRFPNELPIAGEPANIVALVEEYMDWLHQSPVPKLLFWGTPGVLIPPAEAARLAKSLPNCKAVDIGPGLNLLQEDNPDLIGSEIARWLSTLEISGGSGGSGGGGSGGMVFTLEDFVGDWEQTAAYNLDQVLEQGGVSSLLQNLAVSVTPIQRIVRSGENALKIDIHVIIPYEGLSADQMAQIEEVFKVVYPVDDHHFKVILPYGTLVIDGVTPNMLNYFGRPYEGIAVFDGKKITVTGTLWNGNKIIDERLITPDGSMLFRVTINS

SEQ ID NO: 3378 - protein, 448 aa, Synthetic construct
MFHYVDVGPRDGTPVLFLHGNPTSSYVWRNIIPHVAPTHRCIAPDLIGMGKSSKPDIGYFFDDHVRFMDAFIEALGLEEVVLVIHDWGSALGFHWAKRNPERVKGIAFMEFIRPIPTWDEWPEFARETFQAFRTTDVGRKLIIDQNVFIEGTLPMGVVRPLTEVEMDHYREPFLNPEDREPLWRFANELPIAGEPANIVALVEEYMDWLHQSPVPKLLFWGTPGVLIPPAEAARLAKSLPNCKAVDIGPGLNLLQEDNPDLIGSEIARWLSTLEISGGSGGSGGGGSGGMVFTLEDFVGDWEQTAAYNLDQVLEQGGVSSLLQNLAVSVTPIQRIVRSGENALKIDIHVIIPYEGLSADQMAQIEEVFKVVYPVDDHHFKVILPYGTLVIDGVTPNMLNYFGRPYEGIAVFDGKKITVTGTLWNGNKIIDERLITPDGSMLFRVTINS

SEQ ID NO: 3379 - protein, 448 aa, Synthetic construct
MFHYVDVGPRDGTPVLFLHGNPTSSYVWRNIIPHVAPTHRCIAPDLIGMGKSSKPDIGYFFDDHVRFMDAFIEALGLEEVVLVIHDWGSALGFHWAKRNPERVKGIAFMEFIRPIPTWDEWPEFARETFQAFRTTDVGRKLIIDQNVFIEGTLPMGVVRPLTEVEMDHYREPFLNPEDREPLWRFPNELPIAGEPANIVALVEEYMDWLHQSPVPKLLFWGTPGVLIPPAEAARLAKSLPNCKAVDIGPGLNILQEDNPDLIGSEIARWLSTLEISGGSGGSGGGGSGGMVFTLEDFVGDWEQTAAYNLDQVLEQGGVSSLLQNLAVSVTPIQRIVRSGENALKIDIHVIIPYEGLSADQMAQIEEVFKVVYPVDDHHFKVILPYGTLVIDGVTPNMLNYFGRPYEGIAVFDGKKITVTGTLWNGNKIIDERLITPDGSMLFRVTINS

SEQ ID NO: 3380 - protein, 448 aa, Synthetic construct
MFHYVDVGPRDGTPVLFLHGNPTSSYVWRNIIPHVAPTHRCIAPDLIGFGKSGKPDIGYFFDDHVRFMDAFIEALGLEEVVLVIHDWGSALGFHWAKRNPERVKGIAFMEFIRPIPTWDEWPEFARETFQAFRTEDVGRKLIIDQNVFIEGTLPMGVVRPLTEVEMDHYREPFLNPVDREPLWRFPNELPIAGEPANIVALVEEYMDWLHQSPVPKLLFWGTPGVLIPPAEAARLAKSLPNCKAVDIGPGLNLLQEDNPDLIGSEIARWLSTLEISGGSGGSGGGGSGGMVFTLEDFVGDWEQTAAYNLDQVLEQGGVSSLLQNLAVSVTPIQRIVRSGENALKIDIHVIIPYEGLSADQMAQIEEVFKVVYPVDDHHFKVILPYGTLVIDGVTPNMLNYFGRPYEGIAVFDGKKITVTGTLWNGNKIIDERLITPDGSMLFRVTINS

SEQ ID NO: 3381 - protein, 448 aa, Synthetic construct
MFHYVDVGPRDGTPVLFLHGNPTSSYVWRNIIPHVAPTHRCIAPDLIGFGKSDKPDIGYFFDDHVRFMDAFIEALGLEEVVLVIHDWGAALGFHWAKRNPERVKGIAFMEFIRPIPTWDEWPEFARETFQAFRTEDVGRKLIIDQNVFIEGTLPMGVVRPLTEVEMDHYREPFLNPVDREPLWRFPNELPIAGEPANIVALVEEYMDWLHQSPVPKLLFWGTPGVLIPPAEAARLAKSLPNCKAVDIGPGLNLLQEDNPDLIGSEIARWLSTLEISGGSGGSGGGGSGGMVFTLEDFVGDWEQTAAYNLDQVLEQGGVSSLLQNLAVSVTPIQRIVRSGENALKIDIHVIIPYEGLSADQMAQIEEVFKVVYPVDDHHFKVILPYGTLVIDGVTPNMLNYFGRPYEGIAVFDGKKITVTGTLWNGNKIIDERLITPDGSMLFRVTINS

SEQ ID NO: 3382 - protein, 448 aa, Synthetic construct
MFHYVDVGPRDGTPVLFLHGNPTSSYVWRNIIPHVAPTHRCIAPDLIGFGKSDKPDIGYFFDDHVRFMDAFIEALGLEEVVLVIHDWGSALGFHWAKRNPERVKGIAFMEFIRPIPTWDEWPEFARETFQAFRTEDVGRKLIIDQNVFIEGTLPMGVVRPLTEVEMDHYREPFLNPQDREPLWRFPNELPIAGEPANIVALVEEYMDWLHQSPVPKLLFWGTPGVLIPPAEAARLAKSLPNCKAVDIGPGLNLLQEDNPDLIGSEIARWLSTLEISGGSGGSGGGGSGGMVFTLEDFVGDWEQTAAYNLDQVLEQGGVSSLLQNLAVSVTPIQRIVRSGENALKIDIHVIIPYEGLSADQMAQIEEVFKVVYPVDDHHFKVILPYGTLVIDGVTPNMLNYFGRPYEGIAVFDGKKITVTGTLWNGNKIIDERLITPDGSMLFRVTINS

SEQ ID NO: 3383 - protein, 448 aa, Synthetic construct
MFHYVDVGPRDGTPVLFLHGNPTSSYVWRNIIPHVAPTHRCIAPDLIGMGKSGKPDIGYFFDDHVRFMDAFIEALGLEEVVLVIHDWGSALGFHWAKRNPERVKGIAFMEFIRPIPTWDEWPEFAREMFQAFRTEDVGRKLIIDQNVFIEGTLPMGVVRPLTEVEMDHYREPFLNPVDREPLWRFPNELPIAGEPANIVALVEEYMDWLHQSPVPKLLFWGTPGVLIPPAEAARLAKSLPNCKAVDIGPGLNLLQEDNPDLIGSEIARWLSTLEISGGSGGSGGGGSGGMVFTLEDFVGDWEQTAAYNLDQVLEQGGVSSLLQNLAVSVTPIQRIVRSGENALKIDIHVIIPYEGLSADQMAQIEEVFKVVYPVDDHHFKVILPYGTLVIDGVTPNMLNYFGRPYEGIAVFDGKKITVTGTLWNGNKIIDERLITPDGSMLFRVTINS

SEQ ID NO: 3384 - protein, 448 aa, Synthetic construct
MFHYVDVGPRDGTPVLFLHGNPTSSYVWRNIIPHVAPTHRCIAPDLIGMGKSGKPDIGYFFDDHVRFMDAFIEALGLEEVVLVIHDWGSALGFHWAKRNPERVKGIAFMEFIRPIPTWDEWPEFARETFQAFRTEDVGRKLIIDQNVMIEGTLPMGVVRPLTEVEMDHYREPFLNPVDREPLWRFPNELPIAGEPANIVALVEEYMDWLHQSPVPKLLFWGTPGVLIPPAEAARLAKSLPNCKAVDIGPGLNLLQEDNPDLIGSEIARWLSTLEISGGSGGSGGGGSGGMVFTLEDFVGDWEQTAAYNLDQVLEQGGVSSLLQNLAVSVTPIQRIVRSGENALKIDIHVIIPYEGLSADQMAQIEEVFKVVYPVDDHHFKVILPYGTLVIDGVTPNMLNYFGRPYEGIAVFDGKKITVTGTLWNGNKIIDERLITPDGSMLFRVTINS

SEQ ID NO: 3385 - protein, 448 aa, Synthetic construct
MFHYVDVGPRDGTPVLFLHGNPTSSYVWRNIIPHVAPTHRCIAPDLIGMGKSGKPDIGYFFDDHVRFMDAFIEALGLEEVVLVIHDWGSALGFHWAKRNPERVKGIAFMEFIRPIPTWDEWPEFARETFQAFRTEDVGRKLIIDQNVFIEGTLPMGVVRPLTEVEMDHYREPFLNPEDREPLWRFPNELPIAGEPANIVALVEEYMDWLHQSPVPKLLFWGTPGVLIPPAEAARLAKSLPNCKAVDIGPGLNLLQEDNPDLIGSEIARWLSTLEISGGSGGSGGGGSGGMVFTLEDFVGDWEQTAAYNLDQVLEQGGVSSLLQNLAVSVTPIQRIVRSGENALKIDIHVIIPYEGLSADQMAQIEEVFKVVYPVDDHHFKVILPYGTLVIDGVTPNMLNYFGRPYEGIAVFDGKKITVTGTLWNGNKIIDERLITPDGSMLFRVTINS

SEQ ID NO: 3386 - protein, 448 aa, Synthetic construct
MFHYVDVGPRDGTPVLFLHGNPTSSYVWRNIIPHVAPTHRCIAPDLIGMGKSGKPDIGYFFDDHVRFMDAFIEALGLEEVVLVIHDWGSALGFHWAKRNPERVKGIAFMEFIRPIPTWDEWPEFARETFQAFRTEDVGRKLIIDQNVFIEGTLPMGVVRPLTEVEMDHYREPFLNPVDREPLWRFANELPIAGEPANIVALVEEYMDWLHQSPVPKLLFWGTPGVLIPPAEAARLAKSLPNCKAVDIGPGLNLLQEDNPDLIGSEIARWLSTLEISGGSGGSGGGGSGGMVFTLEDFVGDWEQTAAYNLDQVLEQGGVSSLLQNLAVSVTPIQRIVRSGENALKIDIHVIIPYEGLSADQMAQIEEVFKVVYPVDDHHFKVILPYGTLVIDGVTPNMLNYFGRPYEGIAVFDGKKITVTGTLWNGNKIIDERLITPDGSMLFRVTINS

SEQ ID NO: 3387 - protein, 448 aa, Synthetic construct
MFHYVDVGPRDGTPVLFLHGNPTSSYVWRNIIPHVAPTHRCIAPDLIGMGKSSKPPIGYFFDDHVRFMDAFIEALGLEEVVLVIHDWGSALGFHWAKRNPERVKGIAFMEFIRPIPTWDEWPEFARETFQAFRTEDVGRKLIIDQNVFIEGTLPMGVVRPLTEVEMDHYREPFLNPVDREPLWRFPNELPIAGEPANIVALVEEYMDWLHQSPVPKLLFWGTPGVLIPPAEAARLAKSLPNCKAVDIGPGLNLLQEDNPDLIGSEIARWLSTLEISGGSGGSGGGGSGGMVFTLEDFVGDWEQTAAYNLDQVLEQGGVSSLLQNLAVSVTPIQRIVRSGENALKIDIHVIIPYEGLSADQMAQIEEVFKVVYPVDDHHFKVILPYGTLVIDGVTPNMLNYFGRPYEGIAVFDGKKITVTGTLWNGNKIIDERLITPDGSMLFRVTINS

SEQ ID NO: 3388 - protein, 448 aa, Synthetic construct
MFHYVDVGPRDGTPVLFLHGNPTSSYVWRNIIPHVAPTHRCIAPDLIGMGKSSKPDIGYFFDDHVRFMDAFIEALGLEEVVLVIHDWGAALGFHWAKRNPERVKGIAFMEFIRPIPTWDEWPEFARETFQAFRTEDVGRKLIIDQNVFIEGTLPMGVVRPLTEVEMDHYREPFLNPVDREPLWRFPNELPIAGEPANIVALVEEYMDWLHQSPVPKLLFWGTPGVLIPPAEAARLAKSLPNCKAVDIGPGLNLLQEDNPDLIGSEIARWLSTLEISGGSGGSGGGGSGGMVFTLEDFVGDWEQTAAYNLDQVLEQGGVSSLLQNLAVSVTPIQRIVRSGENALKIDIHVIIPYEGLSADQMAQIEEVFKVVYPVDDHHFKVILPYGTLVIDGVTPNMLNYFGRPYEGIAVFDGKKITVTGTLWNGNKIIDERLITPDGSMLFRVTINS

SEQ ID NO: 3389 - protein, 448 aa, Synthetic construct
MFHYVDVGPRDGTPVLFLHGNPTSSYVWRNIIPHVAPTHRCIAPDLIGMGKSSKPDIGYFFDDHVRFMDAFIEALGLEEVVLVIHDWGSALGFHWAKRNPERVKGIAFMEFIRPIPTWDEWPEFARETFQAFRTEDVGRKLIIDQNVFIEGTLPMGVVRPLTEVEMDHYREPFLNPEDREPLWRFPNELPIAGEPANIVALVEEYMDWLHQSPVPKLLFWGTPGVLIPPAEAARLAKSLPNCKAVDIGPGLNLLQEDNPDLIGSEIARWLSTLEISGGSGGSGGGGSGGMVFTLEDFVGDWEQTAAYNLDQVLEQGGVSSLLQNLAVSVTPIQRIVRSGENALKIDIHVIIPYEGLSADQMAQIEEVFKVVYPVDDHHFKVILPYGTLVIDGVTPNMLNYFGRPYEGIAVFDGKKITVTGTLWNGNKIIDERLITPDGSMLFRVTINS

SEQ ID NO: 3390 - protein, 448 aa, Synthetic construct
MFHYVDVGPRDGTPVLFLHGNPTSSYVWRNIIPHVAPTHRCIAPDLIGMGKSSKPDIGYFFDDHVRFMDAFIEALGLEEVVLVIHDWGSALGFHWAKRNPERVKGIAFMEFIRPIPTWDEWPEFARETFQAFRTEDVGRKLIIDQNVFIEGTLPMGVVRPLTEVEMDHYREPFLNPVDREPLWRFANELPIAGEPANIVALVEEYMDWLHQSPVPKLLFWGTPGVLIPPAEAARLAKSLPNCKAVDIGPGLNLLQEDNPDLIGSEIARWLSTLEISGGSGGSGGGGSGGMVFTLEDFVGDWEQTAAYNLDQVLEQGGVSSLLQNLAVSVTPIQRIVRSGENALKIDIHVIIPYEGLSADQMAQIEEVFKVVYPVDDHHFKVILPYGTLVIDGVTPNMLNYFGRPYEGIAVFDGKKITVTGTLWNGNKIIDERLITPDGSMLFRVTINS

SEQ ID NO: 3391 - protein, 448 aa, Synthetic construct
MFHYVDVGPRDGTPVLFLHGNPTSSYVWRNIIPHVAPTHRCIAPDLIGMGKSSKPDIGYFFDDHVRFMDAFIEALGLEEVVLVIHDWGSALGFHWAKRNPERVKGIAFMEFIRPIPTWDEWPEFARETFQAFRTEDVGRKLIIDQNVFIEGTLPMGVVRPLTEVEMDHYREPFLNPVDREPLWRFPNELPIAGEPANIVALVEEYMDWLHQSPVPKLLFWGTPGVLIPPAEAARLAKSLPNCKAVDIGPGLNILQEDNPDLIGSEIARWLSTLEISGGSGGSGGGGSGGMVFTLEDFVGDWEQTAAYNLDQVLEQGGVSSLLQNLAVSVTPIQRIVRSGENALKIDIHVIIPYEGLSADQMAQIEEVFKVVYPVDDHHFKVILPYGTLVIDGVTPNMLNYFGRPYEGIAVFDGKKITVTGTLWNGNKIIDERLITPDGSMLFRVTINS

SEQ ID NO: 3392 - protein, 448 aa, Synthetic construct
MFHYVDVGPRDGTPVLFLHGNPTSSYVWRNIIPHVAPTHRCIAPDLIGFGKSGKPDIGYFFDDHVRFMDAFIEALGLEEVVLVIHDWGSALGFHWAKRNPERVKGIAFMEFIRPIPTWDEWPEFARETFQAFRTTDVGRKLIIDQNVFIEGTLPMGVVRPLTEVEMDHYREPFLNPVDREPLWRFPNELPIAGEPANIVALVEEYMDWLHQSPVPKLLFWGTPGVLIPPAEAARLAKALPNCKAVDIGPGLNLLQEDNPDLIGSEIARWLSTLEISGGSGGSGGGGSGGMVFTLEDFVGDWEQTAAYNLDQVLEQGGVSSLLQNLAVSVTPIQRIVRSGENALKIDIHVIIPYEGLSADQMAQIEEVFKVVYPVDDHHFKVILPYGTLVIDGVTPNMLNYFGRPYEGIAVFDGKKITVTGTLWNGNKIIDERLITPDGSMLFRVTINS

SEQ ID NO: 3393 - protein, 448 aa, Synthetic construct
MFHYVDVGPRDGTPVLFLHGNPTSSYVWRNIIPHVAPTHRCIAPDLIGFGKSDKPDIGYFFDDHVRFMDAFIEALGLEEVVLVIHDWGAALGFHWAKRNPERVKGIAFMEFIRPIPTWDEWPEFARETFQAFRTTDVGRKLIIDQNVFIEGTLPMGVVRPLTEVEMDHYREPFLNPVDREPLWRFPNELPIAGEPANIVALVEEYMDWLHQSPVPKLLFWGTPGVLIPPAEAARLAKALPNCKAVDIGPGLNLLQEDNPDLIGSEIARWLSTLEISGGSGGSGGGGSGGMVFTLEDFVGDWEQTAAYNLDQVLEQGGVSSLLQNLAVSVTPIQRIVRSGENALKIDIHVIIPYEGLSADQMAQIEEVFKVVYPVDDHHFKVILPYGTLVIDGVTPNMLNYFGRPYEGIAVFDGKKITVTGTLWNGNKIIDERLITPDGSMLFRVTINS

SEQ ID NO: 3394 - protein, 448 aa, Synthetic construct
MFHYVDVGPRDGTPVLFLHGNPTSSYVWRNIIPHVAPTHRCIAPDLIGFGKSDKPDIGYFFDDHVRFMDAFIEALGLEEVVLVIHDWGSALGFHWAKRNPERVKGIAFMEFIRPIPTWDEWPEFARETFQAFRTTDVGRKLIIDQNVFIEGTLPMGVVRPLTEVEMDHYREPFLNPQDREPLWRFPNELPIAGEPANIVALVEEYMDWLHQSPVPKLLFWGTPGVLIPPAEAARLAKALPNCKAVDIGPGLNLLQEDNPDLIGSEIARWLSTLEISGGSGGSGGGGSGGMVFTLEDFVGDWEQTAAYNLDQVLEQGGVSSLLQNLAVSVTPIQRIVRSGENALKIDIHVIIPYEGLSADQMAQIEEVFKVVYPVDDHHFKVILPYGTLVIDGVTPNMLNYFGRPYEGIAVFDGKKITVTGTLWNGNKIIDERLITPDGSMLFRVTINS

SEQ ID NO: 3395 - protein, 448 aa, Synthetic construct
MFHYVDVGPRDGTPVLFLHGNPTSSYVWRNIIPHVAPTHRCIAPDLIGMGKSGKPDIGYFFDDHVRFMDAFIEALGLEEVVLVIHDWGSALGFHWAKRNPERVKGIAFMEFIRPIPTWDEWPEFAREMFQAFRTTDVGRKLIIDQNVFIEGTLPMGVVRPLTEVEMDHYREPFLNPVDREPLWRFPNELPIAGEPANIVALVEEYMDWLHQSPVPKLLFWGTPGVLIPPAEAARLAKALPNCKAVDIGPGLNLLQEDNPDLIGSEIARWLSTLEISGGSGGSGGGGSGGMVFTLEDFVGDWEQTAAYNLDQVLEQGGVSSLLQNLAVSVTPIQRIVRSGENALKIDIHVIIPYEGLSADQMAQIEEVFKVVYPVDDHHFKVILPYGTLVIDGVTPNMLNYFGRPYEGIAVFDGKKITVTGTLWNGNKIIDERLITPDGSMLFRVTINS

SEQ ID NO: 3396 - protein, 448 aa, Synthetic construct
MFHYVDVGPRDGTPVLFLHGNPTSSYVWRNIIPHVAPTHRCIAPDLIGMGKSGKPDIGYFFDDHVRFMDAFIEALGLEEVVLVIHDWGSALGFHWAKRNPERVKGIAFMEFIRPIPTWDEWPEFARETFQAFRTTDVGRKLIIDQNVMIEGTLPMGVVRPLTEVEMDHYREPFLNPVDREPLWRFPNELPIAGEPANIVALVEEYMDWLHQSPVPKLLFWGTPGVLIPPAEAARLAKALPNCKAVDIGPGLNLLQEDNPDLIGSEIARWLSTLEISGGSGGSGGGGSGGMVFTLEDFVGDWEQTAAYNLDQVLEQGGVSSLLQNLAVSVTPIQRIVRSGENALKIDIHVIIPYEGLSADQMAQIEEVFKVVYPVDDHHFKVILPYGTLVIDGVTPNMLNYFGRPYEGIAVFDGKKITVTGTLWNGNKIIDERLITPDGSMLFRVTINS

SEQ ID NO: 3397 - protein, 448 aa, Synthetic construct
MFHYVDVGPRDGTPVLFLHGNPTSSYVWRNIIPHVAPTHRCIAPDLIGMGKSGKPDIGYFFDDHVRFMDAFIEALGLEEVVLVIHDWGSALGFHWAKRNPERVKGIAFMEFIRPIPTWDEWPEFARETFQAFRTTDVGRKLIIDQNVFIEGTLPMGVVRPLTEVEMDHYREPFLNPEDREPLWRFPNELPIAGEPANIVALVEEYMDWLHQSPVPKLLFWGTPGVLIPPAEAARLAKALPNCKAVDIGPGLNLLQEDNPDLIGSEIARWLSTLEISGGSGGSGGGGSGGMVFTLEDFVGDWEQTAAYNLDQVLEQGGVSSLLQNLAVSVTPIQRIVRSGENALKIDIHVIIPYEGLSADQMAQIEEVFKVVYPVDDHHFKVILPYGTLVIDGVTPNMLNYFGRPYEGIAVFDGKKITVTGTLWNGNKIIDERLITPDGSMLFRVTINS

SEQ ID NO: 3398 - protein, 448 aa, Synthetic construct
MFHYVDVGPRDGTPVLFLHGNPTSSYVWRNIIPHVAPTHRCIAPDLIGMGKSGKPDIGYFFDDHVRFMDAFIEALGLEEVVLVIHDWGSALGFHWAKRNPERVKGIAFMEFIRPIPTWDEWPEFARETFQAFRTTDVGRKLIIDQNVFIEGTLPMGVVRPLTEVEMDHYREPFLNPVDREPLWRFANELPIAGEPANIVALVEEYMDWLHQSPVPKLLFWGTPGVLIPPAEAARLAKALPNCKAVDIGPGLNLLQEDNPDLIGSEIARWLSTLEISGGSGGSGGGGSGGMVFTLEDFVGDWEQTAAYNLDQVLEQGGVSSLLQNLAVSVTPIQRIVRSGENALKIDIHVIIPYEGLSADQMAQIEEVFKVVYPVDDHHFKVILPYGTLVIDGVTPNMLNYFGRPYEGIAVFDGKKITVTGTLWNGNKIIDERLITPDGSMLFRVTINS

SEQ ID NO: 3399 - protein, 448 aa, Synthetic construct
MFHYVDVGPRDGTPVLFLHGNPTSSYVWRNIIPHVAPTHRCIAPDLIGMGKSSKPPIGYFFDDHVRFMDAFIEALGLEEVVLVIHDWGSALGFHWAKRNPERVKGIAFMEFIRPIPTWDEWPEFARETFQAFRTTDVGRKLIIDQNVFIEGTLPMGVVRPLTEVEMDHYREPFLNPVDREPLWRFPNELPIAGEPANIVALVEEYMDWLHQSPVPKLLFWGTPGVLIPPAEAARLAKALPNCKAVDIGPGLNLLQEDNPDLIGSEIARWLSTLEISGGSGGSGGGGSGGMVFTLEDFVGDWEQTAAYNLDQVLEQGGVSSLLQNLAVSVTPIQRIVRSGENALKIDIHVIIPYEGLSADQMAQIEEVFKVVYPVDDHHFKVILPYGTLVIDGVTPNMLNYFGRPYEGIAVFDGKKITVTGTLWNGNKIIDERLITPDGSMLFRVTINS

SEQ ID NO: 3400 - protein, 448 aa, Synthetic construct
MFHYVDVGPRDGTPVLFLHGNPTSSYVWRNIIPHVAPTHRCIAPDLIGMGKSSKPDIGYFFDDHVRFMDAFIEALGLEEVVLVIHDWGAALGFHWAKRNPERVKGIAFMEFIRPIPTWDEWPEFARETFQAFRTTDVGRKLIIDQNVFIEGTLPMGVVRPLTEVEMDHYREPFLNPVDREPLWRFPNELPIAGEPANIVALVEEYMDWLHQSPVPKLLFWGTPGVLIPPAEAARLAKALPNCKAVDIGPGLNLLQEDNPDLIGSEIARWLSTLEISGGSGGSGGGGSGGMVFTLEDFVGDWEQTAAYNLDQVLEQGGVSSLLQNLAVSVTPIQRIVRSGENALKIDIHVIIPYEGLSADQMAQIEEVFKVVYPVDDHHFKVILPYGTLVIDGVTPNMLNYFGRPYEGIAVFDGKKITVTGTLWNGNKIIDERLITPDGSMLFRVTINS

SEQ ID NO: 3401 - protein, 448 aa, Synthetic construct
MFHYVDVGPRDGTPVLFLHGNPTSSYVWRNIIPHVAPTHRCIAPDLIGMGKSSKPDIGYFFDDHVRFMDAFIEALGLEEVVLVIHDWGSALGFHWAKRNPERVKGIAFMEFIRPIPTWDEWPEFARETFQAFRTTDVGRKLIIDQNVFIEGTLPMGVVRPLTEVEMDHYREPFLNPEDREPLWRFPNELPIAGEPANIVALVEEYMDWLHQSPVPKLLFWGTPGVLIPPAEAARLAKALPNCKAVDIGPGLNLLQEDNPDLIGSEIARWLSTLEISGGSGGSGGGGSGGMVFTLEDFVGDWEQTAAYNLDQVLEQGGVSSLLQNLAVSVTPIQRIVRSGENALKIDIHVIIPYEGLSADQMAQIEEVFKVVYPVDDHHFKVILPYGTLVIDGVTPNMLNYFGRPYEGIAVFDGKKITVTGTLWNGNKIIDERLITPDGSMLFRVTINS

SEQ ID NO: 3402 - protein, 448 aa, Synthetic construct
MFHYVDVGPRDGTPVLFLHGNPTSSYVWRNIIPHVAPTHRCIAPDLIGMGKSSKPDIGYFFDDHVRFMDAFIEALGLEEVVLVIHDWGSALGFHWAKRNPERVKGIAFMEFIRPIPTWDEWPEFARETFQAFRTTDVGRKLIIDQNVFIEGTLPMGVVRPLTEVEMDHYREPFLNPVDREPLWRFANELPIAGEPANIVALVEEYMDWLHQSPVPKLLFWGTPGVLIPPAEAARLAKALPNCKAVDIGPGLNLLQEDNPDLIGSEIARWLSTLEISGGSGGSGGGGSGGMVFTLEDFVGDWEQTAAYNLDQVLEQGGVSSLLQNLAVSVTPIQRIVRSGENALKIDIHVIIPYEGLSADQMAQIEEVFKVVYPVDDHHFKVILPYGTLVIDGVTPNMLNYFGRPYEGIAVFDGKKITVTGTLWNGNKIIDERLITPDGSMLFRVTINS

SEQ ID NO: 3403 - protein, 448 aa, Synthetic construct
MFHYVDVGPRDGTPVLFLHGNPTSSYVWRNIIPHVAPTHRCIAPDLIGMGKSSKPDIGYFFDDHVRFMDAFIEALGLEEVVLVIHDWGSALGFHWAKRNPERVKGIAFMEFIRPIPTWDEWPEFARETFQAFRTTDVGRKLIIDQNVFIEGTLPMGVVRPLTEVEMDHYREPFLNPVDREPLWRFPNELPIAGEPANIVALVEEYMDWLHQSPVPKLLFWGTPGVLIPPAEAARLAKALPNCKAVDIGPGLNILQEDNPDLIGSEIARWLSTLEISGGSGGSGGGGSGGMVFTLEDFVGDWEQTAAYNLDQVLEQGGVSSLLQNLAVSVTPIQRIVRSGENALKIDIHVIIPYEGLSADQMAQIEEVFKVVYPVDDHHFKVILPYGTLVIDGVTPNMLNYFGRPYEGIAVFDGKKITVTGTLWNGNKIIDERLITPDGSMLFRVTINS

SEQ ID NO: 3404 - protein, 448 aa, Synthetic construct
MFHYVDVGPRDGTPVLFLHGNPTSSYVWRNIIPHVAPTHRCIAPDLIGFGKSGKPDLGYFFDDHVRFMDAFIEALGLEEVVLVIHDWGAALGFHWAKRNPERVKGIAFMEFIRPIPTWDEWPEFARETFQAFRTEDVGRKLIIDQNVFIEGTLPMGVVRPLTEVEMDHYREPFLNPVDREPLWRFPNELPIAGEPANIVALVEEYMDWLHQSPVPKLLFWGTPGVLIPPAEAARLAKSLPNCKAVDIGPGLNLLQEDNPDLIGSEIARWLSTLEISGGSGGSGGGGSGGMVFTLEDFVGDWEQTAAYNLDQVLEQGGVSSLLQNLAVSVTPIQRIVRSGENALKIDIHVIIPYEGLSADQMAQIEEVFKVVYPVDDHHFKVILPYGTLVIDGVTPNMLNYFGRPYEGIAVFDGKKITVTGTLWNGNKIIDERLITPDGSMLFRVTINS

SEQ ID NO: 3405 - protein, 448 aa, Synthetic construct
MFHYVDVGPRDGTPVLFLHGNPTSSYVWRNIIPHVAPTHRCIAPDLIGFGKSDKPDLGYFFDDHVRFMDAFIEALGLEEVVLVIHDWGAALGFHWAKRNPERVKGIAFMEFIRPIPTWDEWPEFARETFQAFRTEDVGRKLIIDQNVFIEGTLPMGVVRPLTEVEMDHYREPFLNPQDREPLWRFPNELPIAGEPANIVALVEEYMDWLHQSPVPKLLFWGTPGVLIPPAEAARLAKSLPNCKAVDIGPGLNLLQEDNPDLIGSEIARWLSTLEISGGSGGSGGGGSGGMVFTLEDFVGDWEQTAAYNLDQVLEQGGVSSLLQNLAVSVTPIQRIVRSGENALKIDIHVIIPYEGLSADQMAQIEEVFKVVYPVDDHHFKVILPYGTLVIDGVTPNMLNYFGRPYEGIAVFDGKKITVTGTLWNGNKIIDERLITPDGSMLFRVTINS

SEQ ID NO: 3406 - protein, 448 aa, Synthetic construct
MFHYVDVGPRDGTPVLFLHGNPTSSYVWRNIIPHVAPTHRCIAPDLIGMGKSGKPDIGYFFDDHVRFMDAFIEALGLEEVVLVIHDWGAALGFHWAKRNPERVKGIAFMEFIRPIPTWDEWPEFARETFQAFRTEDVGRKLIIDQNVFIEGTLPMGVVRPLTEVEMDHYREPFLNPVDREPLWRFPNELPIAGEPANIVALVEEYMDWLHQSPVPKLLFWGTPGVLIPPAEAARLAKSLPNCKAVDIGPGLNLLQEDNPDLIGSEIARWLSTLEISGGSGGSGGGGSGGMVFTLEDFVGDWEQTAAYNLDQVLEQGGVSSLLQNLAVSVTPIQRIVRSGENALKIDIHVIIPYEGLSADQMAQIEEVFKVVYPVDDHHFKVILPYGTLVIDGVTPNMLNYFGRPYEGIAVFDGKKITVTGTLWNGNKIIDERLITPDGSMLFRVTINS

SEQ ID NO: 3407 - protein, 448 aa, Synthetic construct
MFHYVDVGPRDGTPVLFLHGNPTSSYVWRNIIPHVAPTHRCIAPDLIGMGKSGKPDLGYFFDDHVRFMDAFIEALGLEEVVLVIHDWGAALGFHWAKRNPERVKGIAFMEFIRPIPTWDEWPEFAREMFQAFRTEDVGRKLIIDQNVFIEGTLPMGVVRPLTEVEMDHYREPFLNPVDREPLWRFPNELPIAGEPANIVALVEEYMDWLHQSPVPKLLFWGTPGVLIPPAEAARLAKSLPNCKAVDIGPGLNLLQEDNPDLIGSEIARWLSTLEISGGSGGSGGGGSGGMVFTLEDFVGDWEQTAAYNLDQVLEQGGVSSLLQNLAVSVTPIQRIVRSGENALKIDIHVIIPYEGLSADQMAQIEEVFKVVYPVDDHHFKVILPYGTLVIDGVTPNMLNYFGRPYEGIAVFDGKKITVTGTLWNGNKIIDERLITPDGSMLFRVTINS

SEQ ID NO: 3408 - protein, 448 aa, Synthetic construct
MFHYVDVGPRDGTPVLFLHGNPTSSYVWRNIIPHVAPTHRCIAPDLIGMGKSGKPDLGYFFDDHVRFMDAFIEALGLEEVVLVIHDWGAALGFHWAKRNPERVKGIAFMEFIRPIPTWDEWPEFARETFQAFRTEDVGRKLIIDQNVMIEGTLPMGVVRPLTEVEMDHYREPFLNPVDREPLWRFPNELPIAGEPANIVALVEEYMDWLHQSPVPKLLFWGTPGVLIPPAEAARLAKSLPNCKAVDIGPGLNLLQEDNPDLIGSEIARWLSTLEISGGSGGSGGGGSGGMVFTLEDFVGDWEQTAAYNLDQVLEQGGVSSLLQNLAVSVTPIQRIVRSGENALKIDIHVIIPYEGLSADQMAQIEEVFKVVYPVDDHHFKVILPYGTLVIDGVTPNMLNYFGRPYEGIAVFDGKKITVTGTLWNGNKIIDERLITPDGSMLFRVTINS

SEQ ID NO: 3409 - protein, 448 aa, Synthetic construct
MFHYVDVGPRDGTPVLFLHGNPTSSYVWRNIIPHVAPTHRCIAPDLIGMGKSGKPDLGYFFDDHVRFMDAFIEALGLEEVVLVIHDWGAALGFHWAKRNPERVKGIAFMEFIRPIPTWDEWPEFARETFQAFRTEDVGRKLIIDQNVFIEGTLPMGVVRPLTEVEMDHYREPFLNPEDREPLWRFPNELPIAGEPANIVALVEEYMDWLHQSPVPKLLFWGTPGVLIPPAEAARLAKSLPNCKAVDIGPGLNLLQEDNPDLIGSEIARWLSTLEISGGSGGSGGGGSGGMVFTLEDFVGDWEQTAAYNLDQVLEQGGVSSLLQNLAVSVTPIQRIVRSGENALKIDIHVIIPYEGLSADQMAQIEEVFKVVYPVDDHHFKVILPYGTLVIDGVTPNMLNYFGRPYEGIAVFDGKKITVTGTLWNGNKIIDERLITPDGSMLFRVTINS

SEQ ID NO: 3410 - protein, 448 aa, Synthetic construct
MFHYVDVGPRDGTPVLFLHGNPTSSYVWRNIIPHVAPTHRCIAPDLIGMGKSGKPDLGYFFDDHVRFMDAFIEALGLEEVVLVIHDWGAALGFHWAKRNPERVKGIAFMEFIRPIPTWDEWPEFARETFQAFRTEDVGRKLIIDQNVFIEGTLPMGVVRPLTEVEMDHYREPFLNPVDREPLWRFANELPIAGEPANIVALVEEYMDWLHQSPVPKLLFWGTPGVLIPPAEAARLAKSLPNCKAVDIGPGLNLLQEDNPDLIGSEIARWLSTLEISGGSGGSGGGGSGGMVFTLEDFVGDWEQTAAYNLDQVLEQGGVSSLLQNLAVSVTPIQRIVRSGENALKIDIHVIIPYEGLSADQMAQIEEVFKVVYPVDDHHFKVILPYGTLVIDGVTPNMLNYFGRPYEGIAVFDGKKITVTGTLWNGNKIIDERLITPDGSMLFRVTINS

SEQ ID NO: 3411 - protein, 448 aa, Synthetic construct
MFHYVDVGPRDGTPVLFLHGNPTSSYVWRNIIPHVAPTHRCIAPDLIGMGKSSKPPLGYFFDDHVRFMDAFIEALGLEEVVLVIHDWGAALGFHWAKRNPERVKGIAFMEFIRPIPTWDEWPEFARETFQAFRTEDVGRKLIIDQNVFIEGTLPMGVVRPLTEVEMDHYREPFLNPVDREPLWRFPNELPIAGEPANIVALVEEYMDWLHQSPVPKLLFWGTPGVLIPPAEAARLAKSLPNCKAVDIGPGLNLLQEDNPDLIGSEIARWLSTLEISGGSGGSGGGGSGGMVFTLEDFVGDWEQTAAYNLDQVLEQGGVSSLLQNLAVSVTPIQRIVRSGENALKIDIHVIIPYEGLSADQMAQIEEVFKVVYPVDDHHFKVILPYGTLVIDGVTPNMLNYFGRPYEGIAVFDGKKITVTGTLWNGNKIIDERLITPDGSMLFRVTINS

SEQ ID NO: 3412 - protein, 448 aa, Synthetic construct
MFHYVDVGPRDGTPVLFLHGNPTSSYVWRNIIPHVAPTHRCIAPDLIGMGKSSKPDLGYFFDDHVRFMDAFIEALGLEEVVLVIHDWGAALGFHWAKRNPERVKGIAFMEFIRPIPTWDEWPEFARETFQAFRTEDVGRKLIIDQNVFIEGTLPMGVVRPLTEVEMDHYREPFLNPEDREPLWRFPNELPIAGEPANIVALVEEYMDWLHQSPVPKLLFWGTPGVLIPPAEAARLAKSLPNCKAVDIGPGLNLLQEDNPDLIGSEIARWLSTLEISGGSGGSGGGGSGGMVFTLEDFVGDWEQTAAYNLDQVLEQGGVSSLLQNLAVSVTPIQRIVRSGENALKIDIHVIIPYEGLSADQMAQIEEVFKVVYPVDDHHFKVILPYGTLVIDGVTPNMLNYFGRPYEGIAVFDGKKITVTGTLWNGNKIIDERLITPDGSMLFRVTINS

SEQ ID NO: 3413 - protein, 448 aa, Synthetic construct
MFHYVDVGPRDGTPVLFLHGNPTSSYVWRNIIPHVAPTHRCIAPDLIGMGKSSKPDLGYFFDDHVRFMDAFIEALGLEEVVLVIHDWGAALGFHWAKRNPERVKGIAFMEFIRPIPTWDEWPEFARETFQAFRTEDVGRKLIIDQNVFIEGTLPMGVVRPLTEVEMDHYREPFLNPVDREPLWRFANELPIAGEPANIVALVEEYMDWLHQSPVPKLLFWGTPGVLIPPAEAARLAKSLPNCKAVDIGPGLNLLQEDNPDLIGSEIARWLSTLEISGGSGGSGGGGSGGMVFTLEDFVGDWEQTAAYNLDQVLEQGGVSSLLQNLAVSVTPIQRIVRSGENALKIDIHVIIPYEGLSADQMAQIEEVFKVVYPVDDHHFKVILPYGTLVIDGVTPNMLNYFGRPYEGIAVFDGKKITVTGTLWNGNKIIDERLITPDGSMLFRVTINS

SEQ ID NO: 3414 - protein, 448 aa, Synthetic construct
MFHYVDVGPRDGTPVLFLHGNPTSSYVWRNIIPHVAPTHRCIAPDLIGMGKSSKPDLGYFFDDHVRFMDAFIEALGLEEVVLVIHDWGAALGFHWAKRNPERVKGIAFMEFIRPIPTWDEWPEFARETFQAFRTEDVGRKLIIDQNVFIEGTLPMGVVRPLTEVEMDHYREPFLNPVDREPLWRFPNELPIAGEPANIVALVEEYMDWLHQSPVPKLLFWGTPGVLIPPAEAARLAKSLPNCKAVDIGPGLNILQEDNPDLIGSEIARWLSTLEISGGSGGSGGGGSGGMVFTLEDFVGDWEQTAAYNLDQVLEQGGVSSLLQNLAVSVTPIQRIVRSGENALKIDIHVIIPYEGLSADQMAQIEEVFKVVYPVDDHHFKVILPYGTLVIDGVTPNMLNYFGRPYEGIAVFDGKKITVTGTLWNGNKIIDERLITPDGSMLFRVTINS

SEQ ID NO: 3415 - protein, 448 aa, Synthetic construct
MFHYVDVGPRDGTPVLFLHGNPTSSYVWRNIIPHVAPTHRCIAPDLIGMGKSDKPDIGYFFDDHVRFMDAFIEALGLEEVVLVIHDWGAALGFHWAKRNPERVKGIAFMEFIRPIPTWDEWPEFARETFQAFRTEDVGRKLIIDQNVFIEGTLPMGVVRPLTEVEMDHYREPFLNPEDREPLWRFPNELPIAGEPANIVALVEEYMDWLHQSPVPKLLFWGTPGVLIPPAEAARLAKSLPNCKAVDIGPGLNLLQEDNPDLIGSEIARWLSTLEISGGSGGSGGGGSGGMVFTLEDFVGDWEQTAAYNLDQVLEQGGVSSLLQNLAVSVTPIQRIVRSGENALKIDIHVIIPYEGLSADQMAQIEEVFKVVYPVDDHHFKVILPYGTLVIDGVTPNMLNYFGRPYEGIAVFDGKKITVTGTLWNGNKIIDERLITPDGSMLFRVTINS

SEQ ID NO: 3416 - protein, 448 aa, Synthetic construct
MFHYVDVGPRDGTPVLFLHGNPTSSYVWRNIIPHVAPTHRCIAPDLIGMGKSDKPDIGYFFDDHVRFMDAFIEALGLEEVVLVIHDWGAALGFHWAKRNPERVKGIAFMEFIRPIPTWDEWPEFARETFQAFRTEDVGRKLIIDQNVFIEGTLPMGVVRPLTEVEMDHYREPFLNPVDREPLWRFPNELPIAGEPANIVALVEEYMDWLHQSPVPKLLFWGTPGVLIPPAEAARLAKALPNCKAVDIGPGLNLLQEDNPDLIGSEIARWLSTLEISGGSGGSGGGGSGGMVFTLEDFVGDWEQTAAYNLDQVLEQGGVSSLLQNLAVSVTPIQRIVRSGENALKIDIHVIIPYEGLSADQMAQIEEVFKVVYPVDDHHFKVILPYGTLVIDGVTPNMLNYFGRPYEGIAVFDGKKITVTGTLWNGNKIIDERLITPDGSMLFRVTINS

SEQ ID NO: 3417 - protein, 448 aa, Synthetic construct
MFHYVDVGPRDGTPVLFLHGNPTSSYVWRNIIPHVAPTHRCIAPDLIGMGKSGKPDLGYFFDDHVRFMDAFIEALGLEEVVLVIHDWGAALGFHWAKRNPERVKGIAFMEFIRPIPTWDEWPEFAREMFQAFRTTDVGRKLIIDQNVFIEGTLPMGVVRPLTEVEMDHYREPFLNPEDREPLWRFPNELPIAGEPANIVALVEEYMDWLHQSPVPKLLFWGTPGVLIPPAEAARLAKSLPNCKAVDIGPGLNLLQEDNPDLIGSEIARWLSTLEISGGSGGSGGGGSGGMVFTLEDFVGDWEQTAAYNLDQVLEQGGVSSLLQNLAVSVTPIQRIVRSGENALKIDIHVIIPYEGLSADQMAQIEEVFKVVYPVDDHHFKVILPYGTLVIDGVTPNMLNYFGRPYEGIAVFDGKKITVTGTLWNGNKIIDERLITPDGSMLFRVTINS

SEQ ID NO: 3418 - protein, 448 aa, Synthetic construct
MFHYVDVGPRDGTPVLFLHGNPTSSYVWRNIIPHVAPTHRCIAPDLIGMGKSGKPDLGYFFDDHVRFMDAFIEALGLEEVVLVIHDWGAALGFHWAKRNPERVKGIAFMEFIRPIPTWDEWPEFARETFQAFRTTDVGRKLIIDQNVMIEGTLPMGVVRPLTEVEMDHYREPFLNPEDREPLWRFPNELPIAGEPANIVALVEEYMDWLHQSPVPKLLFWGTPGVLIPPAEAARLAKSLPNCKAVDIGPGLNLLQEDNPDLIGSEIARWLSTLEISGGSGGSGGGGSGGMVFTLEDFVGDWEQTAAYNLDQVLEQGGVSSLLQNLAVSVTPIQRIVRSGENALKIDIHVIIPYEGLSADQMAQIEEVFKVVYPVDDHHFKVILPYGTLVIDGVTPNMLNYFGRPYEGIAVFDGKKITVTGTLWNGNKIIDERLITPDGSMLFRVTINS

SEQ ID NO: 3419 - protein, 448 aa, Synthetic construct
MFHYVDVGPRDGTPVLFLHGNPTSSYVWRNIIPHVAPTHRCIAPDLIGMGKSGKPDLGYFFDDHVRFMDAFIEALGLEEVVLVIHDWGAALGFHWAKRNPERVKGIAFMEFIRPIPTWDEWPEFARETFQAFRTTDVGRKLIIDQNVFIEGTLPMGVVRPLTEVEMDHYREPFLNPEDREPLWRFANELPIAGEPANIVALVEEYMDWLHQSPVPKLLFWGTPGVLIPPAEAARLAKSLPNCKAVDIGPGLNLLQEDNPDLIGSEIARWLSTLEISGGSGGSGGGGSGGMVFTLEDFVGDWEQTAAYNLDQVLEQGGVSSLLQNLAVSVTPIQRIVRSGENALKIDIHVIIPYEGLSADQMAQIEEVFKVVYPVDDHHFKVILPYGTLVIDGVTPNMLNYFGRPYEGIAVFDGKKITVTGTLWNGNKIIDERLITPDGSMLFRVTINS

SEQ ID NO: 3420 - protein, 448 aa, Synthetic construct
MFHYVDVGPRDGTPVLFLHGNPTSSYVWRNIIPHVAPTHRCIAPDLIGMGKSSKPPLGYFFDDHVRFMDAFIEALGLEEVVLVIHDWGAALGFHWAKRNPERVKGIAFMEFIRPIPTWDEWPEFARETFQAFRTTDVGRKLIIDQNVFIEGTLPMGVVRPLTEVEMDHYREPFLNPEDREPLWRFPNELPIAGEPANIVALVEEYMDWLHQSPVPKLLFWGTPGVLIPPAEAARLAKSLPNCKAVDIGPGLNLLQEDNPDLIGSEIARWLSTLEISGGSGGSGGGGSGGMVFTLEDFVGDWEQTAAYNLDQVLEQGGVSSLLQNLAVSVTPIQRIVRSGENALKIDIHVIIPYEGLSADQMAQIEEVFKVVYPVDDHHFKVILPYGTLVIDGVTPNMLNYFGRPYEGIAVFDGKKITVTGTLWNGNKIIDERLITPDGSMLFRVTINS

SEQ ID NO: 3421 - protein, 448 aa, Synthetic construct
MFHYVDVGPRDGTPVLFLHGNPTSSYVWRNIIPHVAPTHRCIAPDLIGMGKSSKPDLGYFFDDHVRFMDAFIEALGLEEVVLVIHDWGAALGFHWAKRNPERVKGIAFMEFIRPIPTWDEWPEFARETFQAFRTTDVGRKLIIDQNVFIEGTLPMGVVRPLTEVEMDHYREPFLNPEDREPLWRFANELPIAGEPANIVALVEEYMDWLHQSPVPKLLFWGTPGVLIPPAEAARLAKSLPNCKAVDIGPGLNLLQEDNPDLIGSEIARWLSTLEISGGSGGSGGGGSGGMVFTLEDFVGDWEQTAAYNLDQVLEQGGVSSLLQNLAVSVTPIQRIVRSGENALKIDIHVIIPYEGLSADQMAQIEEVFKVVYPVDDHHFKVILPYGTLVIDGVTPNMLNYFGRPYEGIAVFDGKKITVTGTLWNGNKIIDERLITPDGSMLFRVTINS

SEQ ID NO: 3422 - protein, 448 aa, Synthetic construct
MFHYVDVGPRDGTPVLFLHGNPTSSYVWRNIIPHVAPTHRCIAPDLIGMGKSSKPDLGYFFDDHVRFMDAFIEALGLEEVVLVIHDWGAALGFHWAKRNPERVKGIAFMEFIRPIPTWDEWPEFARETFQAFRTTDVGRKLIIDQNVFIEGTLPMGVVRPLTEVEMDHYREPFLNPEDREPLWRFPNELPIAGEPANIVALVEEYMDWLHQSPVPKLLFWGTPGVLIPPAEAARLAKSLPNCKAVDIGPGLNILQEDNPDLIGSEIARWLSTLEISGGSGGSGGGGSGGMVFTLEDFVGDWEQTAAYNLDQVLEQGGVSSLLQNLAVSVTPIQRIVRSGENALKIDIHVIIPYEGLSADQMAQIEEVFKVVYPVDDHHFKVILPYGTLVIDGVTPNMLNYFGRPYEGIAVFDGKKITVTGTLWNGNKIIDERLITPDGSMLFRVTINS

SEQ ID NO: 3423 - protein, 448 aa, Synthetic construct
MFHYVDVGPRDGTPVLFLHGNPTSSYVWRNIIPHVAPTHRCIAPDLIGMGKSDKPDIGYFFDDHVRFMDAFIEALGLEEVVLVIHDWGAALGFHWAKRNPERVKGIAFMEFIRPIPTWDEWPEFARETFQAFRTTDVGRKLIIDQNVFIEGTLPMGVVRPLTEVEMDHYREPFLNPEDREPLWRFPNELPIAGEPANIVALVEEYMDWLHQSPVPKLLFWGTPGVLIPPAEAARLAKALPNCKAVDIGPGLNLLQEDNPDLIGSEIARWLSTLEISGGSGGSGGGGSGGMVFTLEDFVGDWEQTAAYNLDQVLEQGGVSSLLQNLAVSVTPIQRIVRSGENALKIDIHVIIPYEGLSADQMAQIEEVFKVVYPVDDHHFKVILPYGTLVIDGVTPNMLNYFGRPYEGIAVFDGKKITVTGTLWNGNKIIDERLITPDGSMLFRVTINS

SEQ ID NO: 3424 - protein, 448 aa, Synthetic construct
MFHYVDVGPRDGTPVLFLHGNPTSSYVWRNIIPHVAPTHRCIAPDLIGFGKSGKPDLGYFFDDHVRFMDAFIEALGLEEVVLVIHDWGSALGLHWAKRNPERVKGIAFMEFIRPIPTWDEWPEFARETFQAFRTTDVGRKLIIDQNVMIEGTLPMGVVRPLTEVEMDHYREPFLNPVDREPLWRFPNELPIAGEPANIVALVEEYMDWLHQSPVPKLLFWGTPGVLIPPAEAARLAKSLPNCKAVDIGPGLNLLQEDNPDLIGSEIARWLSTLEISGGSGGSGGGGSGGMVFTLEDFVGDWEQTAAYNLDQVLEQGGVSSLLQNLAVSVTPIQRIVRSGENALKIDIHVIIPYEGLSADQMAQIEEVFKVVYPVDDHHFKVILPYGTLVIDGVTPNMLNYFGRPYEGIAVFDGKKITVTGTLWNGNKIIDERLITPDGSMLFRVTINS

SEQ ID NO: 3425 - protein, 448 aa, Synthetic construct
MFHYVDVGPRDGTPVLFLHGNPTSSYVWRNIIPHVAPTHRCIAPDLIGFGKSDKPDIGYFFDDHVRFMDAFIEALGLEEVVLVIHDWGSALGLHWAKRNPERVKGIAFMEFIRPIPTWDEWPEFARETFQAFRTTDVGRKLIIDQNVMIEGTLPMGVVRPLTEVEMDHYREPFLNPVDREPLWRFPNELPIAGEPANIVALVEEYMDWLHQSPVPKLLFWGTPGVLIPPAEAARLAKSLPNCKAVDIGPGLNLLQEDNPDLIGSEIARWLSTLEISGGSGGSGGGGSGGMVFTLEDFVGDWEQTAAYNLDQVLEQGGVSSLLQNLAVSVTPIQRIVRSGENALKIDIHVIIPYEGLSADQMAQIEEVFKVVYPVDDHHFKVILPYGTLVIDGVTPNMLNYFGRPYEGIAVFDGKKITVTGTLWNGNKIIDERLITPDGSMLFRVTINS

SEQ ID NO: 3426 - protein, 448 aa, Synthetic construct
MFHYVDVGPRDGTPVLFLHGNPTSSYVWRNIIPHVAPTHRCIAPDLIGFGKSDKPDLGYFFDDHVRFMDAFIEALGLEEVVLVIHDWGAALGLHWAKRNPERVKGIAFMEFIRPIPTWDEWPEFARETFQAFRTTDVGRKLIIDQNVMIEGTLPMGVVRPLTEVEMDHYREPFLNPVDREPLWRFPNELPIAGEPANIVALVEEYMDWLHQSPVPKLLFWGTPGVLIPPAEAARLAKSLPNCKAVDIGPGLNLLQEDNPDLIGSEIARWLSTLEISGGSGGSGGGGSGGMVFTLEDFVGDWEQTAAYNLDQVLEQGGVSSLLQNLAVSVTPIQRIVRSGENALKIDIHVIIPYEGLSADQMAQIEEVFKVVYPVDDHHFKVILPYGTLVIDGVTPNMLNYFGRPYEGIAVFDGKKITVTGTLWNGNKIIDERLITPDGSMLFRVTINS

SEQ ID NO: 3427 - protein, 448 aa, Synthetic construct
MFHYVDVGPRDGTPVLFLHGNPTSSYVWRNIIPHVAPTHRCIAPDLIGFGKSDKPDLGYFFDDHVRFMDAFIEALGLEEVVLVIHDWGSALGLHWAKRNPERVKGIAFMEFIRPIPTWDEWPEFARETFQAFRTTDVGRKLIIDQNVMIEGTLPMGVVRPLTEVEMDHYREPFLNPQDREPLWRFPNELPIAGEPANIVALVEEYMDWLHQSPVPKLLFWGTPGVLIPPAEAARLAKSLPNCKAVDIGPGLNLLQEDNPDLIGSEIARWLSTLEISGGSGGSGGGGSGGMVFTLEDFVGDWEQTAAYNLDQVLEQGGVSSLLQNLAVSVTPIQRIVRSGENALKIDIHVIIPYEGLSADQMAQIEEVFKVVYPVDDHHFKVILPYGTLVIDGVTPNMLNYFGRPYEGIAVFDGKKITVTGTLWNGNKIIDERLITPDGSMLFRVTINS

SEQ ID NO: 3428 - protein, 448 aa, Synthetic construct
MFHYVDVGPRDGTPVLFLHGNPTSSYVWRNIIPHVAPTHRCIAPDLIGMGKSGKPDIGYFFDDHVRFMDAFIEALGLEEVVLVIHDWGSALGLHWAKRNPERVKGIAFMEFIRPIPTWDEWPEFARETFQAFRTTDVGRKLIIDQNVMIEGTLPMGVVRPLTEVEMDHYREPFLNPVDREPLWRFPNELPIAGEPANIVALVEEYMDWLHQSPVPKLLFWGTPGVLIPPAEAARLAKSLPNCKAVDIGPGLNLLQEDNPDLIGSEIARWLSTLEISGGSGGSGGGGSGGMVFTLEDFVGDWEQTAAYNLDQVLEQGGVSSLLQNLAVSVTPIQRIVRSGENALKIDIHVIIPYEGLSADQMAQIEEVFKVVYPVDDHHFKVILPYGTLVIDGVTPNMLNYFGRPYEGIAVFDGKKITVTGTLWNGNKIIDERLITPDGSMLFRVTINS

SEQ ID NO: 3429 - protein, 448 aa, Synthetic construct
MFHYVDVGPRDGTPVLFLHGNPTSSYVWRNIIPHVAPTHRCIAPDLIGMGKSGKPDLGYFFDDHVRFMDAFIEALGLEEVVLVIHDWGSALGLHWAKRNPERVKGIAFMEFIRPIPTWDEWPEFAREMFQAFRTTDVGRKLIIDQNVMIEGTLPMGVVRPLTEVEMDHYREPFLNPVDREPLWRFPNELPIAGEPANIVALVEEYMDWLHQSPVPKLLFWGTPGVLIPPAEAARLAKSLPNCKAVDIGPGLNLLQEDNPDLIGSEIARWLSTLEISGGSGGSGGGGSGGMVFTLEDFVGDWEQTAAYNLDQVLEQGGVSSLLQNLAVSVTPIQRIVRSGENALKIDIHVIIPYEGLSADQMAQIEEVFKVVYPVDDHHFKVILPYGTLVIDGVTPNMLNYFGRPYEGIAVFDGKKITVTGTLWNGNKIIDERLITPDGSMLFRVTINS

SEQ ID NO: 3430 - protein, 448 aa, Synthetic construct
MFHYVDVGPRDGTPVLFLHGNPTSSYVWRNIIPHVAPTHRCIAPDLIGMGKSGKPDLGYFFDDHVRFMDAFIEALGLEEVVLVIHDWGSALGLHWAKRNPERVKGIAFMEFIRPIPTWDEWPEFARETFQAFRTTDVGRKLIIDQNVMIEGTLPMGVVRPLTEVEMDHYREPFLNPEDREPLWRFPNELPIAGEPANIVALVEEYMDWLHQSPVPKLLFWGTPGVLIPPAEAARLAKSLPNCKAVDIGPGLNLLQEDNPDLIGSEIARWLSTLEISGGSGGSGGGGSGGMVFTLEDFVGDWEQTAAYNLDQVLEQGGVSSLLQNLAVSVTPIQRIVRSGENALKIDIHVIIPYEGLSADQMAQIEEVFKVVYPVDDHHFKVILPYGTLVIDGVTPNMLNYFGRPYEGIAVFDGKKITVTGTLWNGNKIIDERLITPDGSMLFRVTINS

SEQ ID NO: 3431 - protein, 448 aa, Synthetic construct
MFHYVDVGPRDGTPVLFLHGNPTSSYVWRNIIPHVAPTHRCIAPDLIGMGKSGKPDLGYFFDDHVRFMDAFIEALGLEEVVLVIHDWGSALGLHWAKRNPERVKGIAFMEFIRPIPTWDEWPEFARETFQAFRTTDVGRKLIIDQNVMIEGTLPMGVVRPLTEVEMDHYREPFLNPVDREPLWRFANELPIAGEPANIVALVEEYMDWLHQSPVPKLLFWGTPGVLIPPAEAARLAKSLPNCKAVDIGPGLNLLQEDNPDLIGSEIARWLSTLEISGGSGGSGGGGSGGMVFTLEDFVGDWEQTAAYNLDQVLEQGGVSSLLQNLAVSVTPIQRIVRSGENALKIDIHVIIPYEGLSADQMAQIEEVFKVVYPVDDHHFKVILPYGTLVIDGVTPNMLNYFGRPYEGIAVFDGKKITVTGTLWNGNKIIDERLITPDGSMLFRVTINS

SEQ ID NO: 3432 - protein, 448 aa, Synthetic construct
MFHYVDVGPRDGTPVLFLHGNPTSSYVWRNIIPHVAPTHRCIAPDLIGMGKSSKPPLGYFFDDHVRFMDAFIEALGLEEVVLVIHDWGSALGLHWAKRNPERVKGIAFMEFIRPIPTWDEWPEFARETFQAFRTTDVGRKLIIDQNVMIEGTLPMGVVRPLTEVEMDHYREPFLNPVDREPLWRFPNELPIAGEPANIVALVEEYMDWLHQSPVPKLLFWGTPGVLIPPAEAARLAKSLPNCKAVDIGPGLNLLQEDNPDLIGSEIARWLSTLEISGGSGGSGGGGSGGMVFTLEDFVGDWEQTAAYNLDQVLEQGGVSSLLQNLAVSVTPIQRIVRSGENALKIDIHVIIPYEGLSADQMAQIEEVFKVVYPVDDHHFKVILPYGTLVIDGVTPNMLNYFGRPYEGIAVFDGKKITVTGTLWNGNKIIDERLITPDGSMLFRVTINS

SEQ ID NO: 3433 - protein, 448 aa, Synthetic construct
MFHYVDVGPRDGTPVLFLHGNPTSSYVWRNIIPHVAPTHRCIAPDLIGMGKSSKPDIGYFFDDHVRFMDAFIEALGLEEVVLVIHDWGSALGLHWAKRNPERVKGIAFMEFIRPIPTWDEWPEFARETFQAFRTTDVGRKLIIDQNVMIEGTLPMGVVRPLTEVEMDHYREPFLNPVDREPLWRFPNELPIAGEPANIVALVEEYMDWLHQSPVPKLLFWGTPGVLIPPAEAARLAKSLPNCKAVDIGPGLNLLQEDNPDLIGSEIARWLSTLEISGGSGGSGGGGSGGMVFTLEDFVGDWEQTAAYNLDQVLEQGGVSSLLQNLAVSVTPIQRIVRSGENALKIDIHVIIPYEGLSADQMAQIEEVFKVVYPVDDHHFKVILPYGTLVIDGVTPNMLNYFGRPYEGIAVFDGKKITVTGTLWNGNKIIDERLITPDGSMLFRVTINS

SEQ ID NO: 3434 - protein, 448 aa, Synthetic construct
MFHYVDVGPRDGTPVLFLHGNPTSSYVWRNIIPHVAPTHRCIAPDLIGMGKSSKPDLGYFFDDHVRFMDAFIEALGLEEVVLVIHDWGAALGLHWAKRNPERVKGIAFMEFIRPIPTWDEWPEFARETFQAFRTTDVGRKLIIDQNVMIEGTLPMGVVRPLTEVEMDHYREPFLNPVDREPLWRFPNELPIAGEPANIVALVEEYMDWLHQSPVPKLLFWGTPGVLIPPAEAARLAKSLPNCKAVDIGPGLNLLQEDNPDLIGSEIARWLSTLEISGGSGGSGGGGSGGMVFTLEDFVGDWEQTAAYNLDQVLEQGGVSSLLQNLAVSVTPIQRIVRSGENALKIDIHVIIPYEGLSADQMAQIEEVFKVVYPVDDHHFKVILPYGTLVIDGVTPNMLNYFGRPYEGIAVFDGKKITVTGTLWNGNKIIDERLITPDGSMLFRVTINS

SEQ ID NO: 3435 - protein, 448 aa, Synthetic construct
MFHYVDVGPRDGTPVLFLHGNPTSSYVWRNIIPHVAPTHRCIAPDLIGMGKSSKPDLGYFFDDHVRFMDAFIEALGLEEVVLVIHDWGSALGLHWAKRNPERVKGIAFMEFIRPIPTWDEWPEFARETFQAFRTTDVGRKLIIDQNVMIEGTLPMGVVRPLTEVEMDHYREPFLNPEDREPLWRFPNELPIAGEPANIVALVEEYMDWLHQSPVPKLLFWGTPGVLIPPAEAARLAKSLPNCKAVDIGPGLNLLQEDNPDLIGSEIARWLSTLEISGGSGGSGGGGSGGMVFTLEDFVGDWEQTAAYNLDQVLEQGGVSSLLQNLAVSVTPIQRIVRSGENALKIDIHVIIPYEGLSADQMAQIEEVFKVVYPVDDHHFKVILPYGTLVIDGVTPNMLNYFGRPYEGIAVFDGKKITVTGTLWNGNKIIDERLITPDGSMLFRVTINS

SEQ ID NO: 3436 - protein, 448 aa, Synthetic construct
MFHYVDVGPRDGTPVLFLHGNPTSSYVWRNIIPHVAPTHRCIAPDLIGMGKSSKPDLGYFFDDHVRFMDAFIEALGLEEVVLVIHDWGSALGLHWAKRNPERVKGIAFMEFIRPIPTWDEWPEFARETFQAFRTTDVGRKLIIDQNVMIEGTLPMGVVRPLTEVEMDHYREPFLNPVDREPLWRFANELPIAGEPANIVALVEEYMDWLHQSPVPKLLFWGTPGVLIPPAEAARLAKSLPNCKAVDIGPGLNLLQEDNPDLIGSEIARWLSTLEISGGSGGSGGGGSGGMVFTLEDFVGDWEQTAAYNLDQVLEQGGVSSLLQNLAVSVTPIQRIVRSGENALKIDIHVIIPYEGLSADQMAQIEEVFKVVYPVDDHHFKVILPYGTLVIDGVTPNMLNYFGRPYEGIAVFDGKKITVTGTLWNGNKIIDERLITPDGSMLFRVTINS

SEQ ID NO: 3437 - protein, 448 aa, Synthetic construct
MFHYVDVGPRDGTPVLFLHGNPTSSYVWRNIIPHVAPTHRCIAPDLIGMGKSSKPDLGYFFDDHVRFMDAFIEALGLEEVVLVIHDWGSALGLHWAKRNPERVKGIAFMEFIRPIPTWDEWPEFARETFQAFRTTDVGRKLIIDQNVMIEGTLPMGVVRPLTEVEMDHYREPFLNPVDREPLWRFPNELPIAGEPANIVALVEEYMDWLHQSPVPKLLFWGTPGVLIPPAEAARLAKSLPNCKAVDIGPGLNILQEDNPDLIGSEIARWLSTLEISGGSGGSGGGGSGGMVFTLEDFVGDWEQTAAYNLDQVLEQGGVSSLLQNLAVSVTPIQRIVRSGENALKIDIHVIIPYEGLSADQMAQIEEVFKVVYPVDDHHFKVILPYGTLVIDGVTPNMLNYFGRPYEGIAVFDGKKITVTGTLWNGNKIIDERLITPDGSMLFRVTINS

SEQ ID NO: 3438 - protein, 448 aa, Synthetic construct
MFHYVDVGPRDGTPVLFLHGNPTSSYVWRNIIPHVAPTHRCIAPDLIGMGKSDKPDIGYFFDDHVRFMDAFIEALGLEEVVLVIHDWGAALGLHWAKRNPERVKGIAFMEFIRPIPTWDEWPEFARETFQAFRTTDVGRKLIIDQNVMIEGTLPMGVVRPLTEVEMDHYREPFLNPVDREPLWRFPNELPIAGEPANIVALVEEYMDWLHQSPVPKLLFWGTPGVLIPPAEAARLAKSLPNCKAVDIGPGLNLLQEDNPDLIGSEIARWLSTLEISGGSGGSGGGGSGGMVFTLEDFVGDWEQTAAYNLDQVLEQGGVSSLLQNLAVSVTPIQRIVRSGENALKIDIHVIIPYEGLSADQMAQIEEVFKVVYPVDDHHFKVILPYGTLVIDGVTPNMLNYFGRPYEGIAVFDGKKITVTGTLWNGNKIIDERLITPDGSMLFRVTINS

SEQ ID NO: 3439 - protein, 448 aa, Synthetic construct
MFHYVDVGPRDGTPVLFLHGNPTSSYVWRNIIPHVAPTHRCIAPDLIGMGKSDKPDIGYFFDDHVRFMDAFIEALGLEEVVLVIHDWGSALGLHWAKRNPERVKGIAFMEFIRPIPTWDEWPEFARETFQAFRTTDVGRKLIIDQNVMIEGTLPMGVVRPLTEVEMDHYREPFLNPEDREPLWRFPNELPIAGEPANIVALVEEYMDWLHQSPVPKLLFWGTPGVLIPPAEAARLAKSLPNCKAVDIGPGLNLLQEDNPDLIGSEIARWLSTLEISGGSGGSGGGGSGGMVFTLEDFVGDWEQTAAYNLDQVLEQGGVSSLLQNLAVSVTPIQRIVRSGENALKIDIHVIIPYEGLSADQMAQIEEVFKVVYPVDDHHFKVILPYGTLVIDGVTPNMLNYFGRPYEGIAVFDGKKITVTGTLWNGNKIIDERLITPDGSMLFRVTINS

SEQ ID NO: 3440 - protein, 448 aa, Synthetic construct
MFHYVDVGPRDGTPVLFLHGNPTSSYVWRNIIPHVAPTHRCIAPDLIGMGKSDKPDIGYFFDDHVRFMDAFIEALGLEEVVLVIHDWGSALGLHWAKRNPERVKGIAFMEFIRPIPTWDEWPEFARETFQAFRTEDVGRKLIIDQNVMIEGTLPMGVVRPLTEVEMDHYREPFLNPVDREPLWRFPNELPIAGEPANIVALVEEYMDWLHQSPVPKLLFWGTPGVLIPPAEAARLAKSLPNCKAVDIGPGLNLLQEDNPDLIGSEIARWLSTLEISGGSGGSGGGGSGGMVFTLEDFVGDWEQTAAYNLDQVLEQGGVSSLLQNLAVSVTPIQRIVRSGENALKIDIHVIIPYEGLSADQMAQIEEVFKVVYPVDDHHFKVILPYGTLVIDGVTPNMLNYFGRPYEGIAVFDGKKITVTGTLWNGNKIIDERLITPDGSMLFRVTINS

SEQ ID NO: 3441 - protein, 448 aa, Synthetic construct
MFHYVDVGPRDGTPVLFLHGNPTSSYVWRNIIPHVAPTHRCIAPDLIGMGKSDKPDIGYFFDDHVRFMDAFIEALGLEEVVLVIHDWGSALGLHWAKRNPERVKGIAFMEFIRPIPTWDEWPEFARETFQAFRTTDVGRKLIIDQNVMIEGTLPMGVVRPLTEVEMDHYREPFLNPVDREPLWRFPNELPIAGEPANIVALVEEYMDWLHQSPVPKLLFWGTPGVLIPPAEAARLAKALPNCKAVDIGPGLNLLQEDNPDLIGSEIARWLSTLEISGGSGGSGGGGSGGMVFTLEDFVGDWEQTAAYNLDQVLEQGGVSSLLQNLAVSVTPIQRIVRSGENALKIDIHVIIPYEGLSADQMAQIEEVFKVVYPVDDHHFKVILPYGTLVIDGVTPNMLNYFGRPYEGIAVFDGKKITVTGTLWNGNKIIDERLITPDGSMLFRVTINS

SEQ ID NO: 3442 - protein, 448 aa, Synthetic construct
MFHYVDVGPRDGTPVLFLHGNPTSSYVWRNIIPHVAPTHRCIAPDLIGMGKSDKPDLGYFFDDHVRFMDAFIEALGLEEVVLVIHDWGAALGLHWAKRNPERVKGIAFMEFIRPIPTWDEWPEFARETFQAFRTEDVGRKLIIDQNVMIEGTLPMGVVRPLTEVEMDHYREPFLNPVDREPLWRFPNELPIAGEPANIVALVEEYMDWLHQSPVPKLLFWGTPGVLIPPAEAARLAKSLPNCKAVDIGPGLNLLQEDNPDLIGSEIARWLSTLEISGGSGGSGGGGSGGMVFTLEDFVGDWEQTAAYNLDQVLEQGGVSSLLQNLAVSVTPIQRIVRSGENALKIDIHVIIPYEGLSADQMAQIEEVFKVVYPVDDHHFKVILPYGTLVIDGVTPNMLNYFGRPYEGIAVFDGKKITVTGTLWNGNKIIDERLITPDGSMLFRVTINS

SEQ ID NO: 3443 - protein, 448 aa, Synthetic construct
MFHYVDVGPRDGTPVLFLHGNPTSSYVWRNIIPHVAPTHRCIAPDLIGMGKSDKPDLGYFFDDHVRFMDAFIEALGLEEVVLVIHDWGAALGLHWAKRNPERVKGIAFMEFIRPIPTWDEWPEFARETFQAFRTTDVGRKLIIDQNVMIEGTLPMGVVRPLTEVEMDHYREPFLNPEDREPLWRFPNELPIAGEPANIVALVEEYMDWLHQSPVPKLLFWGTPGVLIPPAEAARLAKSLPNCKAVDIGPGLNLLQEDNPDLIGSEIARWLSTLEISGGSGGSGGGGSGGMVFTLEDFVGDWEQTAAYNLDQVLEQGGVSSLLQNLAVSVTPIQRIVRSGENALKIDIHVIIPYEGLSADQMAQIEEVFKVVYPVDDHHFKVILPYGTLVIDGVTPNMLNYFGRPYEGIAVFDGKKITVTGTLWNGNKIIDERLITPDGSMLFRVTINS

SEQ ID NO: 3444 - protein, 448 aa, Synthetic construct
MFHYVDVGPRDGTPVLFLHGNPTSSYVWRNIIPHVAPTHRCIAPDLIGFGKSGKPDLGYFFDDHVRFMDAFIEALGLEEVVLVIHDWGSALGLHWAKRNPERVKGIAFMEFIRPIPTWDEWPEFARETFQAFRTTDVGRKLIIDQNVFIEGTLPMGVVRPLTEVEMDHYREPFLNPVDREPLWRFANELPIAGEPANIVALVEEYMDWLHQSPVPKLLFWGTPGVLIPPAEAARLAKSLPNCKAVDIGPGLNLLQEDNPDLIGSEIARWLSTLEISGGSGGSGGGGSGGMVFTLEDFVGDWEQTAAYNLDQVLEQGGVSSLLQNLAVSVTPIQRIVRSGENALKIDIHVIIPYEGLSADQMAQIEEVFKVVYPVDDHHFKVILPYGTLVIDGVTPNMLNYFGRPYEGIAVFDGKKITVTGTLWNGNKIIDERLITPDGSMLFRVTINS

SEQ ID NO: 3445 - protein, 448 aa, Synthetic construct
MFHYVDVGPRDGTPVLFLHGNPTSSYVWRNIIPHVAPTHRCIAPDLIGFGKSDKPDIGYFFDDHVRFMDAFIEALGLEEVVLVIHDWGSALGLHWAKRNPERVKGIAFMEFIRPIPTWDEWPEFARETFQAFRTTDVGRKLIIDQNVFIEGTLPMGVVRPLTEVEMDHYREPFLNPVDREPLWRFANELPIAGEPANIVALVEEYMDWLHQSPVPKLLFWGTPGVLIPPAEAARLAKSLPNCKAVDIGPGLNLLQEDNPDLIGSEIARWLSTLEISGGSGGSGGGGSGGMVFTLEDFVGDWEQTAAYNLDQVLEQGGVSSLLQNLAVSVTPIQRIVRSGENALKIDIHVIIPYEGLSADQMAQIEEVFKVVYPVDDHHFKVILPYGTLVIDGVTPNMLNYFGRPYEGIAVFDGKKITVTGTLWNGNKIIDERLITPDGSMLFRVTINS

SEQ ID NO: 3446 - protein, 448 aa, Synthetic construct
MFHYVDVGPRDGTPVLFLHGNPTSSYVWRNIIPHVAPTHRCIAPDLIGFGKSDKPDLGYFFDDHVRFMDAFIEALGLEEVVLVIHDWGAALGLHWAKRNPERVKGIAFMEFIRPIPTWDEWPEFARETFQAFRTTDVGRKLIIDQNVFIEGTLPMGVVRPLTEVEMDHYREPFLNPVDREPLWRFANELPIAGEPANIVALVEEYMDWLHQSPVPKLLFWGTPGVLIPPAEAARLAKSLPNCKAVDIGPGLNLLQEDNPDLIGSEIARWLSTLEISGGSGGSGGGGSGGMVFTLEDFVGDWEQTAAYNLDQVLEQGGVSSLLQNLAVSVTPIQRIVRSGENALKIDIHVIIPYEGLSADQMAQIEEVFKVVYPVDDHHFKVILPYGTLVIDGVTPNMLNYFGRPYEGIAVFDGKKITVTGTLWNGNKIIDERLITPDGSMLFRVTINS

SEQ ID NO: 3447 - protein, 448 aa, Synthetic construct
MFHYVDVGPRDGTPVLFLHGNPTSSYVWRNIIPHVAPTHRCIAPDLIGFGKSDKPDLGYFFDDHVRFMDAFIEALGLEEVVLVIHDWGSALGLHWAKRNPERVKGIAFMEFIRPIPTWDEWPEFARETFQAFRTTDVGRKLIIDQNVFIEGTLPMGVVRPLTEVEMDHYREPFLNPQDREPLWRFANELPIAGEPANIVALVEEYMDWLHQSPVPKLLFWGTPGVLIPPAEAARLAKSLPNCKAVDIGPGLNLLQEDNPDLIGSEIARWLSTLEISGGSGGSGGGGSGGMVFTLEDFVGDWEQTAAYNLDQVLEQGGVSSLLQNLAVSVTPIQRIVRSGENALKIDIHVIIPYEGLSADQMAQIEEVFKVVYPVDDHHFKVILPYGTLVIDGVTPNMLNYFGRPYEGIAVFDGKKITVTGTLWNGNKIIDERLITPDGSMLFRVTINS

SEQ ID NO: 3448 - protein, 448 aa, Synthetic construct
MFHYVDVGPRDGTPVLFLHGNPTSSYVWRNIIPHVAPTHRCIAPDLIGMGKSGKPDIGYFFDDHVRFMDAFIEALGLEEVVLVIHDWGSALGLHWAKRNPERVKGIAFMEFIRPIPTWDEWPEFARETFQAFRTTDVGRKLIIDQNVFIEGTLPMGVVRPLTEVEMDHYREPFLNPVDREPLWRFANELPIAGEPANIVALVEEYMDWLHQSPVPKLLFWGTPGVLIPPAEAARLAKSLPNCKAVDIGPGLNLLQEDNPDLIGSEIARWLSTLEISGGSGGSGGGGSGGMVFTLEDFVGDWEQTAAYNLDQVLEQGGVSSLLQNLAVSVTPIQRIVRSGENALKIDIHVIIPYEGLSADQMAQIEEVFKVVYPVDDHHFKVILPYGTLVIDGVTPNMLNYFGRPYEGIAVFDGKKITVTGTLWNGNKIIDERLITPDGSMLFRVTINS

SEQ ID NO: 3449 - protein, 448 aa, Synthetic construct
MFHYVDVGPRDGTPVLFLHGNPTSSYVWRNIIPHVAPTHRCIAPDLIGMGKSGKPDLGYFFDDHVRFMDAFIEALGLEEVVLVIHDWGSALGLHWAKRNPERVKGIAFMEFIRPIPTWDEWPEFAREMFQAFRTTDVGRKLIIDQNVFIEGTLPMGVVRPLTEVEMDHYREPFLNPVDREPLWRFANELPIAGEPANIVALVEEYMDWLHQSPVPKLLFWGTPGVLIPPAEAARLAKSLPNCKAVDIGPGLNLLQEDNPDLIGSEIARWLSTLEISGGSGGSGGGGSGGMVFTLEDFVGDWEQTAAYNLDQVLEQGGVSSLLQNLAVSVTPIQRIVRSGENALKIDIHVIIPYEGLSADQMAQIEEVFKVVYPVDDHHFKVILPYGTLVIDGVTPNMLNYFGRPYEGIAVFDGKKITVTGTLWNGNKIIDERLITPDGSMLFRVTINS

SEQ ID NO: 3450 - protein, 448 aa, Synthetic construct
MFHYVDVGPRDGTPVLFLHGNPTSSYVWRNIIPHVAPTHRCIAPDLIGMGKSGKPDLGYFFDDHVRFMDAFIEALGLEEVVLVIHDWGSALGLHWAKRNPERVKGIAFMEFIRPIPTWDEWPEFARETFQAFRTTDVGRKLIIDQNVFIEGTLPMGVVRPLTEVEMDHYREPFLNPEDREPLWRFANELPIAGEPANIVALVEEYMDWLHQSPVPKLLFWGTPGVLIPPAEAARLAKSLPNCKAVDIGPGLNLLQEDNPDLIGSEIARWLSTLEISGGSGGSGGGGSGGMVFTLEDFVGDWEQTAAYNLDQVLEQGGVSSLLQNLAVSVTPIQRIVRSGENALKIDIHVIIPYEGLSADQMAQIEEVFKVVYPVDDHHFKVILPYGTLVIDGVTPNMLNYFGRPYEGIAVFDGKKITVTGTLWNGNKIIDERLITPDGSMLFRVTINS

SEQ ID NO: 3451 - protein, 448 aa, Synthetic construct
MFHYVDVGPRDGTPVLFLHGNPTSSYVWRNIIPHVAPTHRCIAPDLIGMGKSSKPPLGYFFDDHVRFMDAFIEALGLEEVVLVIHDWGSALGLHWAKRNPERVKGIAFMEFIRPIPTWDEWPEFARETFQAFRTTDVGRKLIIDQNVFIEGTLPMGVVRPLTEVEMDHYREPFLNPVDREPLWRFANELPIAGEPANIVALVEEYMDWLHQSPVPKLLFWGTPGVLIPPAEAARLAKSLPNCKAVDIGPGLNLLQEDNPDLIGSEIARWLSTLEISGGSGGSGGGGSGGMVFTLEDFVGDWEQTAAYNLDQVLEQGGVSSLLQNLAVSVTPIQRIVRSGENALKIDIHVIIPYEGLSADQMAQIEEVFKVVYPVDDHHFKVILPYGTLVIDGVTPNMLNYFGRPYEGIAVFDGKKITVTGTLWNGNKIIDERLITPDGSMLFRVTINS

SEQ ID NO: 3452 - protein, 448 aa, Synthetic construct
MFHYVDVGPRDGTPVLFLHGNPTSSYVWRNIIPHVAPTHRCIAPDLIGMGKSSKPDIGYFFDDHVRFMDAFIEALGLEEVVLVIHDWGSALGLHWAKRNPERVKGIAFMEFIRPIPTWDEWPEFARETFQAFRTTDVGRKLIIDQNVFIEGTLPMGVVRPLTEVEMDHYREPFLNPVDREPLWRFANELPIAGEPANIVALVEEYMDWLHQSPVPKLLFWGTPGVLIPPAEAARLAKSLPNCKAVDIGPGLNLLQEDNPDLIGSEIARWLSTLEISGGSGGSGGGGSGGMVFTLEDFVGDWEQTAAYNLDQVLEQGGVSSLLQNLAVSVTPIQRIVRSGENALKIDIHVIIPYEGLSADQMAQIEEVFKVVYPVDDHHFKVILPYGTLVIDGVTPNMLNYFGRPYEGIAVFDGKKITVTGTLWNGNKIIDERLITPDGSMLFRVTINS

SEQ ID NO: 3453 - protein, 448 aa, Synthetic construct
MFHYVDVGPRDGTPVLFLHGNPTSSYVWRNIIPHVAPTHRCIAPDLIGMGKSSKPDLGYFFDDHVRFMDAFIEALGLEEVVLVIHDWGAALGLHWAKRNPERVKGIAFMEFIRPIPTWDEWPEFARETFQAFRTTDVGRKLIIDQNVFIEGTLPMGVVRPLTEVEMDHYREPFLNPVDREPLWRFANELPIAGEPANIVALVEEYMDWLHQSPVPKLLFWGTPGVLIPPAEAARLAKSLPNCKAVDIGPGLNLLQEDNPDLIGSEIARWLSTLEISGGSGGSGGGGSGGMVFTLEDFVGDWEQTAAYNLDQVLEQGGVSSLLQNLAVSVTPIQRIVRSGENALKIDIHVIIPYEGLSADQMAQIEEVFKVVYPVDDHHFKVILPYGTLVIDGVTPNMLNYFGRPYEGIAVFDGKKITVTGTLWNGNKIIDERLITPDGSMLFRVTINS

SEQ ID NO: 3454 - protein, 448 aa, Synthetic construct
MFHYVDVGPRDGTPVLFLHGNPTSSYVWRNIIPHVAPTHRCIAPDLIGMGKSSKPDLGYFFDDHVRFMDAFIEALGLEEVVLVIHDWGSALGLHWAKRNPERVKGIAFMEFIRPIPTWDEWPEFARETFQAFRTTDVGRKLIIDQNVFIEGTLPMGVVRPLTEVEMDHYREPFLNPEDREPLWRFANELPIAGEPANIVALVEEYMDWLHQSPVPKLLFWGTPGVLIPPAEAARLAKSLPNCKAVDIGPGLNLLQEDNPDLIGSEIARWLSTLEISGGSGGSGGGGSGGMVFTLEDFVGDWEQTAAYNLDQVLEQGGVSSLLQNLAVSVTPIQRIVRSGENALKIDIHVIIPYEGLSADQMAQIEEVFKVVYPVDDHHFKVILPYGTLVIDGVTPNMLNYFGRPYEGIAVFDGKKITVTGTLWNGNKIIDERLITPDGSMLFRVTINS

SEQ ID NO: 3455 - protein, 448 aa, Synthetic construct
MFHYVDVGPRDGTPVLFLHGNPTSSYVWRNIIPHVAPTHRCIAPDLIGMGKSSKPDLGYFFDDHVRFMDAFIEALGLEEVVLVIHDWGSALGLHWAKRNPERVKGIAFMEFIRPIPTWDEWPEFARETFQAFRTTDVGRKLIIDQNVFIEGTLPMGVVRPLTEVEMDHYREPFLNPVDREPLWRFANELPIAGEPANIVALVEEYMDWLHQSPVPKLLFWGTPGVLIPPAEAARLAKSLPNCKAVDIGPGLNILQEDNPDLIGSEIARWLSTLEISGGSGGSGGGGSGGMVFTLEDFVGDWEQTAAYNLDQVLEQGGVSSLLQNLAVSVTPIQRIVRSGENALKIDIHVIIPYEGLSADQMAQIEEVFKVVYPVDDHHFKVILPYGTLVIDGVTPNMLNYFGRPYEGIAVFDGKKITVTGTLWNGNKIIDERLITPDGSMLFRVTINS

SEQ ID NO: 3456 - protein, 448 aa, Synthetic construct
MFHYVDVGPRDGTPVLFLHGNPTSSYVWRNIIPHVAPTHRCIAPDLIGMGKSDKPDIGYFFDDHVRFMDAFIEALGLEEVVLVIHDWGAALGLHWAKRNPERVKGIAFMEFIRPIPTWDEWPEFARETFQAFRTTDVGRKLIIDQNVFIEGTLPMGVVRPLTEVEMDHYREPFLNPVDREPLWRFANELPIAGEPANIVALVEEYMDWLHQSPVPKLLFWGTPGVLIPPAEAARLAKSLPNCKAVDIGPGLNLLQEDNPDLIGSEIARWLSTLEISGGSGGSGGGGSGGMVFTLEDFVGDWEQTAAYNLDQVLEQGGVSSLLQNLAVSVTPIQRIVRSGENALKIDIHVIIPYEGLSADQMAQIEEVFKVVYPVDDHHFKVILPYGTLVIDGVTPNMLNYFGRPYEGIAVFDGKKITVTGTLWNGNKIIDERLITPDGSMLFRVTINS

SEQ ID NO: 3457 - protein, 448 aa, Synthetic construct
MFHYVDVGPRDGTPVLFLHGNPTSSYVWRNIIPHVAPTHRCIAPDLIGMGKSDKPDIGYFFDDHVRFMDAFIEALGLEEVVLVIHDWGSALGLHWAKRNPERVKGIAFMEFIRPIPTWDEWPEFARETFQAFRTTDVGRKLIIDQNVFIEGTLPMGVVRPLTEVEMDHYREPFLNPEDREPLWRFANELPIAGEPANIVALVEEYMDWLHQSPVPKLLFWGTPGVLIPPAEAARLAKSLPNCKAVDIGPGLNLLQEDNPDLIGSEIARWLSTLEISGGSGGSGGGGSGGMVFTLEDFVGDWEQTAAYNLDQVLEQGGVSSLLQNLAVSVTPIQRIVRSGENALKIDIHVIIPYEGLSADQMAQIEEVFKVVYPVDDHHFKVILPYGTLVIDGVTPNMLNYFGRPYEGIAVFDGKKITVTGTLWNGNKIIDERLITPDGSMLFRVTINS

SEQ ID NO: 3458 - protein, 448 aa, Synthetic construct
MFHYVDVGPRDGTPVLFLHGNPTSSYVWRNIIPHVAPTHRCIAPDLIGMGKSDKPDIGYFFDDHVRFMDAFIEALGLEEVVLVIHDWGSALGLHWAKRNPERVKGIAFMEFIRPIPTWDEWPEFARETFQAFRTEDVGRKLIIDQNVFIEGTLPMGVVRPLTEVEMDHYREPFLNPVDREPLWRFANELPIAGEPANIVALVEEYMDWLHQSPVPKLLFWGTPGVLIPPAEAARLAKSLPNCKAVDIGPGLNLLQEDNPDLIGSEIARWLSTLEISGGSGGSGGGGSGGMVFTLEDFVGDWEQTAAYNLDQVLEQGGVSSLLQNLAVSVTPIQRIVRSGENALKIDIHVIIPYEGLSADQMAQIEEVFKVVYPVDDHHFKVILPYGTLVIDGVTPNMLNYFGRPYEGIAVFDGKKITVTGTLWNGNKIIDERLITPDGSMLFRVTINS

SEQ ID NO: 3459 - protein, 448 aa, Synthetic construct
MFHYVDVGPRDGTPVLFLHGNPTSSYVWRNIIPHVAPTHRCIAPDLIGMGKSDKPDIGYFFDDHVRFMDAFIEALGLEEVVLVIHDWGSALGLHWAKRNPERVKGIAFMEFIRPIPTWDEWPEFARETFQAFRTTDVGRKLIIDQNVFIEGTLPMGVVRPLTEVEMDHYREPFLNPVDREPLWRFANELPIAGEPANIVALVEEYMDWLHQSPVPKLLFWGTPGVLIPPAEAARLAKALPNCKAVDIGPGLNLLQEDNPDLIGSEIARWLSTLEISGGSGGSGGGGSGGMVFTLEDFVGDWEQTAAYNLDQVLEQGGVSSLLQNLAVSVTPIQRIVRSGENALKIDIHVIIPYEGLSADQMAQIEEVFKVVYPVDDHHFKVILPYGTLVIDGVTPNMLNYFGRPYEGIAVFDGKKITVTGTLWNGNKIIDERLITPDGSMLFRVTINS

SEQ ID NO: 3460 - protein, 448 aa, Synthetic construct
MFHYVDVGPRDGTPVLFLHGNPTSSYVWRNIIPHVAPTHRCIAPDLIGMGKSDKPDLGYFFDDHVRFMDAFIEALGLEEVVLVIHDWGAALGLHWAKRNPERVKGIAFMEFIRPIPTWDEWPEFARETFQAFRTEDVGRKLIIDQNVFIEGTLPMGVVRPLTEVEMDHYREPFLNPVDREPLWRFANELPIAGEPANIVALVEEYMDWLHQSPVPKLLFWGTPGVLIPPAEAARLAKSLPNCKAVDIGPGLNLLQEDNPDLIGSEIARWLSTLEISGGSGGSGGGGSGGMVFTLEDFVGDWEQTAAYNLDQVLEQGGVSSLLQNLAVSVTPIQRIVRSGENALKIDIHVIIPYEGLSADQMAQIEEVFKVVYPVDDHHFKVILPYGTLVIDGVTPNMLNYFGRPYEGIAVFDGKKITVTGTLWNGNKIIDERLITPDGSMLFRVTINS

SEQ ID NO: 3461 - protein, 448 aa, Synthetic construct
MFHYVDVGPRDGTPVLFLHGNPTSSYVWRNIIPHVAPTHRCIAPDLIGMGKSDKPDLGYFFDDHVRFMDAFIEALGLEEVVLVIHDWGAALGLHWAKRNPERVKGIAFMEFIRPIPTWDEWPEFARETFQAFRTTDVGRKLIIDQNVFIEGTLPMGVVRPLTEVEMDHYREPFLNPEDREPLWRFANELPIAGEPANIVALVEEYMDWLHQSPVPKLLFWGTPGVLIPPAEAARLAKSLPNCKAVDIGPGLNLLQEDNPDLIGSEIARWLSTLEISGGSGGSGGGGSGGMVFTLEDFVGDWEQTAAYNLDQVLEQGGVSSLLQNLAVSVTPIQRIVRSGENALKIDIHVIIPYEGLSADQMAQIEEVFKVVYPVDDHHFKVILPYGTLVIDGVTPNMLNYFGRPYEGIAVFDGKKITVTGTLWNGNKIIDERLITPDGSMLFRVTINS

SEQ ID NO: 3462 - protein, 448 aa, Synthetic construct
MFHYVDVGPRDGTPVLFLHGNPTSSYVWRNIIPHVAPTHRCIAPDLIGFGKSGKPDLGYFFDDHVRFMDAFIEALGLEEVVLVIHDWGSALGFHWAKRNPERVKGIAFMEFIRPIPTWDEWPEFARETFQAFRTEDVGRKLIIDQNVFIEGTLPMGVVRPLTEVEMDHYREPFLNPVDREPLWRFPNELPIAGEPANIVALVEEYMDWLHQSPVPKLLFWGTPGVLIPPAEAARLAKSLPNCKAVDIGPGLNILQEDNPDLIGSEIARWLSTLEISGGSGGSGGGGSGGMVFTLEDFVGDWEQTAAYNLDQVLEQGGVSSLLQNLAVSVTPIQRIVRSGENALKIDIHVIIPYEGLSADQMAQIEEVFKVVYPVDDHHFKVILPYGTLVIDGVTPNMLNYFGRPYEGIAVFDGKKITVTGTLWNGNKIIDERLITPDGSMLFRVTINS

SEQ ID NO: 3463 - protein, 448 aa, Synthetic construct
MFHYVDVGPRDGTPVLFLHGNPTSSYVWRNIIPHVAPTHRCIAPDLIGFGKSDKPDIGYFFDDHVRFMDAFIEALGLEEVVLVIHDWGSALGFHWAKRNPERVKGIAFMEFIRPIPTWDEWPEFARETFQAFRTEDVGRKLIIDQNVFIEGTLPMGVVRPLTEVEMDHYREPFLNPVDREPLWRFPNELPIAGEPANIVALVEEYMDWLHQSPVPKLLFWGTPGVLIPPAEAARLAKSLPNCKAVDIGPGLNILQEDNPDLIGSEIARWLSTLEISGGSGGSGGGGSGGMVFTLEDFVGDWEQTAAYNLDQVLEQGGVSSLLQNLAVSVTPIQRIVRSGENALKIDIHVIIPYEGLSADQMAQIEEVFKVVYPVDDHHFKVILPYGTLVIDGVTPNMLNYFGRPYEGIAVFDGKKITVTGTLWNGNKIIDERLITPDGSMLFRVTINS

SEQ ID NO: 3464 - protein, 448 aa, Synthetic construct
MFHYVDVGPRDGTPVLFLHGNPTSSYVWRNIIPHVAPTHRCIAPDLIGFGKSDKPDLGYFFDDHVRFMDAFIEALGLEEVVLVIHDWGAALGFHWAKRNPERVKGIAFMEFIRPIPTWDEWPEFARETFQAFRTEDVGRKLIIDQNVFIEGTLPMGVVRPLTEVEMDHYREPFLNPVDREPLWRFPNELPIAGEPANIVALVEEYMDWLHQSPVPKLLFWGTPGVLIPPAEAARLAKSLPNCKAVDIGPGLNILQEDNPDLIGSEIARWLSTLEISGGSGGSGGGGSGGMVFTLEDFVGDWEQTAAYNLDQVLEQGGVSSLLQNLAVSVTPIQRIVRSGENALKIDIHVIIPYEGLSADQMAQIEEVFKVVYPVDDHHFKVILPYGTLVIDGVTPNMLNYFGRPYEGIAVFDGKKITVTGTLWNGNKIIDERLITPDGSMLFRVTINS

SEQ ID NO: 3465 - protein, 448 aa, Synthetic construct
MFHYVDVGPRDGTPVLFLHGNPTSSYVWRNIIPHVAPTHRCIAPDLIGFGKSDKPDLGYFFDDHVRFMDAFIEALGLEEVVLVIHDWGSALGFHWAKRNPERVKGIAFMEFIRPIPTWDEWPEFARETFQAFRTEDVGRKLIIDQNVFIEGTLPMGVVRPLTEVEMDHYREPFLNPQDREPLWRFPNELPIAGEPANIVALVEEYMDWLHQSPVPKLLFWGTPGVLIPPAEAARLAKSLPNCKAVDIGPGLNILQEDNPDLIGSEIARWLSTLEISGGSGGSGGGGSGGMVFTLEDFVGDWEQTAAYNLDQVLEQGGVSSLLQNLAVSVTPIQRIVRSGENALKIDIHVIIPYEGLSADQMAQIEEVFKVVYPVDDHHFKVILPYGTLVIDGVTPNMLNYFGRPYEGIAVFDGKKITVTGTLWNGNKIIDERLITPDGSMLFRVTINS

SEQ ID NO: 3466 - protein, 448 aa, Synthetic construct
MFHYVDVGPRDGTPVLFLHGNPTSSYVWRNIIPHVAPTHRCIAPDLIGMGKSGKPDIGYFFDDHVRFMDAFIEALGLEEVVLVIHDWGSALGFHWAKRNPERVKGIAFMEFIRPIPTWDEWPEFARETFQAFRTEDVGRKLIIDQNVFIEGTLPMGVVRPLTEVEMDHYREPFLNPVDREPLWRFPNELPIAGEPANIVALVEEYMDWLHQSPVPKLLFWGTPGVLIPPAEAARLAKSLPNCKAVDIGPGLNILQEDNPDLIGSEIARWLSTLEISGGSGGSGGGGSGGMVFTLEDFVGDWEQTAAYNLDQVLEQGGVSSLLQNLAVSVTPIQRIVRSGENALKIDIHVIIPYEGLSADQMAQIEEVFKVVYPVDDHHFKVILPYGTLVIDGVTPNMLNYFGRPYEGIAVFDGKKITVTGTLWNGNKIIDERLITPDGSMLFRVTINS

SEQ ID NO: 3467 - protein, 448 aa, Synthetic construct
MFHYVDVGPRDGTPVLFLHGNPTSSYVWRNIIPHVAPTHRCIAPDLIGMGKSGKPDLGYFFDDHVRFMDAFIEALGLEEVVLVIHDWGSALGFHWAKRNPERVKGIAFMEFIRPIPTWDEWPEFAREMFQAFRTEDVGRKLIIDQNVFIEGTLPMGVVRPLTEVEMDHYREPFLNPVDREPLWRFPNELPIAGEPANIVALVEEYMDWLHQSPVPKLLFWGTPGVLIPPAEAARLAKSLPNCKAVDIGPGLNILQEDNPDLIGSEIARWLSTLEISGGSGGSGGGGSGGMVFTLEDFVGDWEQTAAYNLDQVLEQGGVSSLLQNLAVSVTPIQRIVRSGENALKIDIHVIIPYEGLSADQMAQIEEVFKVVYPVDDHHFKVILPYGTLVIDGVTPNMLNYFGRPYEGIAVFDGKKITVTGTLWNGNKIIDERLITPDGSMLFRVTINS

SEQ ID NO: 3468 - protein, 448 aa, Synthetic construct
MFHYVDVGPRDGTPVLFLHGNPTSSYVWRNIIPHVAPTHRCIAPDLIGMGKSGKPDLGYFFDDHVRFMDAFIEALGLEEVVLVIHDWGSALGFHWAKRNPERVKGIAFMEFIRPIPTWDEWPEFARETFQAFRTEDVGRKLIIDQNVMIEGTLPMGVVRPLTEVEMDHYREPFLNPVDREPLWRFPNELPIAGEPANIVALVEEYMDWLHQSPVPKLLFWGTPGVLIPPAEAARLAKSLPNCKAVDIGPGLNILQEDNPDLIGSEIARWLSTLEISGGSGGSGGGGSGGMVFTLEDFVGDWEQTAAYNLDQVLEQGGVSSLLQNLAVSVTPIQRIVRSGENALKIDIHVIIPYEGLSADQMAQIEEVFKVVYPVDDHHFKVILPYGTLVIDGVTPNMLNYFGRPYEGIAVFDGKKITVTGTLWNGNKIIDERLITPDGSMLFRVTINS

SEQ ID NO: 3469 - protein, 448 aa, Synthetic construct
MFHYVDVGPRDGTPVLFLHGNPTSSYVWRNIIPHVAPTHRCIAPDLIGMGKSGKPDLGYFFDDHVRFMDAFIEALGLEEVVLVIHDWGSALGFHWAKRNPERVKGIAFMEFIRPIPTWDEWPEFARETFQAFRTEDVGRKLIIDQNVFIEGTLPMGVVRPLTEVEMDHYREPFLNPEDREPLWRFPNELPIAGEPANIVALVEEYMDWLHQSPVPKLLFWGTPGVLIPPAEAARLAKSLPNCKAVDIGPGLNILQEDNPDLIGSEIARWLSTLEISGGSGGSGGGGSGGMVFTLEDFVGDWEQTAAYNLDQVLEQGGVSSLLQNLAVSVTPIQRIVRSGENALKIDIHVIIPYEGLSADQMAQIEEVFKVVYPVDDHHFKVILPYGTLVIDGVTPNMLNYFGRPYEGIAVFDGKKITVTGTLWNGNKIIDERLITPDGSMLFRVTINS

SEQ ID NO: 3470 - protein, 448 aa, Synthetic construct
MFHYVDVGPRDGTPVLFLHGNPTSSYVWRNIIPHVAPTHRCIAPDLIGMGKSGKPDLGYFFDDHVRFMDAFIEALGLEEVVLVIHDWGSALGFHWAKRNPERVKGIAFMEFIRPIPTWDEWPEFARETFQAFRTEDVGRKLIIDQNVFIEGTLPMGVVRPLTEVEMDHYREPFLNPVDREPLWRFANELPIAGEPANIVALVEEYMDWLHQSPVPKLLFWGTPGVLIPPAEAARLAKSLPNCKAVDIGPGLNILQEDNPDLIGSEIARWLSTLEISGGSGGSGGGGSGGMVFTLEDFVGDWEQTAAYNLDQVLEQGGVSSLLQNLAVSVTPIQRIVRSGENALKIDIHVIIPYEGLSADQMAQIEEVFKVVYPVDDHHFKVILPYGTLVIDGVTPNMLNYFGRPYEGIAVFDGKKITVTGTLWNGNKIIDERLITPDGSMLFRVTINS

SEQ ID NO: 3471 - protein, 448 aa, Synthetic construct
MFHYVDVGPRDGTPVLFLHGNPTSSYVWRNIIPHVAPTHRCIAPDLIGMGKSSKPPLGYFFDDHVRFMDAFIEALGLEEVVLVIHDWGSALGFHWAKRNPERVKGIAFMEFIRPIPTWDEWPEFARETFQAFRTEDVGRKLIIDQNVFIEGTLPMGVVRPLTEVEMDHYREPFLNPVDREPLWRFPNELPIAGEPANIVALVEEYMDWLHQSPVPKLLFWGTPGVLIPPAEAARLAKSLPNCKAVDIGPGLNILQEDNPDLIGSEIARWLSTLEISGGSGGSGGGGSGGMVFTLEDFVGDWEQTAAYNLDQVLEQGGVSSLLQNLAVSVTPIQRIVRSGENALKIDIHVIIPYEGLSADQMAQIEEVFKVVYPVDDHHFKVILPYGTLVIDGVTPNMLNYFGRPYEGIAVFDGKKITVTGTLWNGNKIIDERLITPDGSMLFRVTINS

SEQ ID NO: 3472 - protein, 448 aa, Synthetic construct
MFHYVDVGPRDGTPVLFLHGNPTSSYVWRNIIPHVAPTHRCIAPDLIGMGKSSKPDLGYFFDDHVRFMDAFIEALGLEEVVLVIHDWGSALGFHWAKRNPERVKGIAFMEFIRPIPTWDEWPEFARETFQAFRTEDVGRKLIIDQNVFIEGTLPMGVVRPLTEVEMDHYREPFLNPEDREPLWRFPNELPIAGEPANIVALVEEYMDWLHQSPVPKLLFWGTPGVLIPPAEAARLAKSLPNCKAVDIGPGLNILQEDNPDLIGSEIARWLSTLEISGGSGGSGGGGSGGMVFTLEDFVGDWEQTAAYNLDQVLEQGGVSSLLQNLAVSVTPIQRIVRSGENALKIDIHVIIPYEGLSADQMAQIEEVFKVVYPVDDHHFKVILPYGTLVIDGVTPNMLNYFGRPYEGIAVFDGKKITVTGTLWNGNKIIDERLITPDGSMLFRVTINS

SEQ ID NO: 3473 - protein, 448 aa, Synthetic construct
MFHYVDVGPRDGTPVLFLHGNPTSSYVWRNIIPHVAPTHRCIAPDLIGMGKSSKPDLGYFFDDHVRFMDAFIEALGLEEVVLVIHDWGSALGFHWAKRNPERVKGIAFMEFIRPIPTWDEWPEFARETFQAFRTEDVGRKLIIDQNVFIEGTLPMGVVRPLTEVEMDHYREPFLNPVDREPLWRFANELPIAGEPANIVALVEEYMDWLHQSPVPKLLFWGTPGVLIPPAEAARLAKSLPNCKAVDIGPGLNILQEDNPDLIGSEIARWLSTLEISGGSGGSGGGGSGGMVFTLEDFVGDWEQTAAYNLDQVLEQGGVSSLLQNLAVSVTPIQRIVRSGENALKIDIHVIIPYEGLSADQMAQIEEVFKVVYPVDDHHFKVILPYGTLVIDGVTPNMLNYFGRPYEGIAVFDGKKITVTGTLWNGNKIIDERLITPDGSMLFRVTINS

SEQ ID NO: 3474 - protein, 448 aa, Synthetic construct
MFHYVDVGPRDGTPVLFLHGNPTSSYVWRNIIPHVAPTHRCIAPDLIGMGKSDKPDIGYFFDDHVRFMDAFIEALGLEEVVLVIHDWGAALGFHWAKRNPERVKGIAFMEFIRPIPTWDEWPEFARETFQAFRTEDVGRKLIIDQNVFIEGTLPMGVVRPLTEVEMDHYREPFLNPVDREPLWRFPNELPIAGEPANIVALVEEYMDWLHQSPVPKLLFWGTPGVLIPPAEAARLAKSLPNCKAVDIGPGLNILQEDNPDLIGSEIARWLSTLEISGGSGGSGGGGSGGMVFTLEDFVGDWEQTAAYNLDQVLEQGGVSSLLQNLAVSVTPIQRIVRSGENALKIDIHVIIPYEGLSADQMAQIEEVFKVVYPVDDHHFKVILPYGTLVIDGVTPNMLNYFGRPYEGIAVFDGKKITVTGTLWNGNKIIDERLITPDGSMLFRVTINS

SEQ ID NO: 3475 - protein, 448 aa, Synthetic construct
MFHYVDVGPRDGTPVLFLHGNPTSSYVWRNIIPHVAPTHRCIAPDLIGMGKSDKPDIGYFFDDHVRFMDAFIEALGLEEVVLVIHDWGSALGFHWAKRNPERVKGIAFMEFIRPIPTWDEWPEFARETFQAFRTEDVGRKLIIDQNVFIEGTLPMGVVRPLTEVEMDHYREPFLNPEDREPLWRFPNELPIAGEPANIVALVEEYMDWLHQSPVPKLLFWGTPGVLIPPAEAARLAKSLPNCKAVDIGPGLNILQEDNPDLIGSEIARWLSTLEISGGSGGSGGGGSGGMVFTLEDFVGDWEQTAAYNLDQVLEQGGVSSLLQNLAVSVTPIQRIVRSGENALKIDIHVIIPYEGLSADQMAQIEEVFKVVYPVDDHHFKVILPYGTLVIDGVTPNMLNYFGRPYEGIAVFDGKKITVTGTLWNGNKIIDERLITPDGSMLFRVTINS

SEQ ID NO: 3476 - protein, 448 aa, Synthetic construct
MFHYVDVGPRDGTPVLFLHGNPTSSYVWRNIIPHVAPTHRCIAPDLIGMGKSDKPDIGYFFDDHVRFMDAFIEALGLEEVVLVIHDWGSALGFHWAKRNPERVKGIAFMEFIRPIPTWDEWPEFARETFQAFRTEDVGRKLIIDQNVFIEGTLPMGVVRPLTEVEMDHYREPFLNPVDREPLWRFPNELPIAGEPANIVALVEEYMDWLHQSPVPKLLFWGTPGVLIPPAEAARLAKALPNCKAVDIGPGLNILQEDNPDLIGSEIARWLSTLEISGGSGGSGGGGSGGMVFTLEDFVGDWEQTAAYNLDQVLEQGGVSSLLQNLAVSVTPIQRIVRSGENALKIDIHVIIPYEGLSADQMAQIEEVFKVVYPVDDHHFKVILPYGTLVIDGVTPNMLNYFGRPYEGIAVFDGKKITVTGTLWNGNKIIDERLITPDGSMLFRVTINS

SEQ ID NO: 3477 - protein, 448 aa, Synthetic construct
MFHYVDVGPRDGTPVLFLHGNPTSSYVWRNIIPHVAPTHRCIAPDLIGMGKSDKPDLGYFFDDHVRFMDAFIEALGLEEVVLVIHDWGAALGFHWAKRNPERVKGIAFMEFIRPIPTWDEWPEFARETFQAFRTEDVGRKLIIDQNVFIEGTLPMGVVRPLTEVEMDHYREPFLNPEDREPLWRFPNELPIAGEPANIVALVEEYMDWLHQSPVPKLLFWGTPGVLIPPAEAARLAKSLPNCKAVDIGPGLNILQEDNPDLIGSEIARWLSTLEISGGSGGSGGGGSGGMVFTLEDFVGDWEQTAAYNLDQVLEQGGVSSLLQNLAVSVTPIQRIVRSGENALKIDIHVIIPYEGLSADQMAQIEEVFKVVYPVDDHHFKVILPYGTLVIDGVTPNMLNYFGRPYEGIAVFDGKKITVTGTLWNGNKIIDERLITPDGSMLFRVTINS

SEQ ID NO: 3478 - protein, 448 aa, Synthetic construct
MFHYVDVGPRDGTPVLFLHGNPTSSYVWRNIIPHVAPTHRCIAPDLIGMGKSDKPDLGYFFDDHVRFMDAFIEALGLEEVVLVIHDWGSALGLHWAKRNPERVKGIAFMEFIRPIPTWDEWPEFARETFQAFRTEDVGRKLIIDQNVMIEGTLPMGVVRPLTEVEMDHYREPFLNPVDREPLWRFPNELPIAGEPANIVALVEEYMDWLHQSPVPKLLFWGTPGVLIPPAEAARLAKSLPNCKAVDIGPGLNILQEDNPDLIGSEIARWLSTLEISGGSGGSGGGGSGGMVFTLEDFVGDWEQTAAYNLDQVLEQGGVSSLLQNLAVSVTPIQRIVRSGENALKIDIHVIIPYEGLSADQMAQIEEVFKVVYPVDDHHFKVILPYGTLVIDGVTPNMLNYFGRPYEGIAVFDGKKITVTGTLWNGNKIIDERLITPDGSMLFRVTINS

SEQ ID NO: 3479 - protein, 448 aa, Synthetic construct
MFHYVDVGPRDGTPVLFLHGNPTSSYVWRNIIPHVAPTHRCIAPDLIGMGKSDKPDLGYFFDDHVRFMDAFIEALGLEEVVLVIHDWGSALGLHWAKRNPERVKGIAFMEFIRPIPTWDEWPEFARETFQAFRTEDVGRKLIIDQNVFIEGTLPMGVVRPLTEVEMDHYREPFLNPVDREPLWRFANELPIAGEPANIVALVEEYMDWLHQSPVPKLLFWGTPGVLIPPAEAARLAKSLPNCKAVDIGPGLNILQEDNPDLIGSEIARWLSTLEISGGSGGSGGGGSGGMVFTLEDFVGDWEQTAAYNLDQVLEQGGVSSLLQNLAVSVTPIQRIVRSGENALKIDIHVIIPYEGLSADQMAQIEEVFKVVYPVDDHHFKVILPYGTLVIDGVTPNMLNYFGRPYEGIAVFDGKKITVTGTLWNGNKIIDERLITPDGSMLFRVTINS

SEQ ID NO: 3480 - protein, 448 aa, Synthetic construct
MFHYVDVGPRDGTPVLFLHGNPTSSYVWRNIIPHVAPTHRCIAPDLIGFGKSGKPDLGYFFDDHVRFMDAFIEALGLEEVVLVIHDWGSALGFHWAKRNPERVKGIAFMEFIRPIPTWDEWPEFARETFQAFRTTDVGRKLIIDQNVMIEGTLPMGVVRPLTEVEMDHYREPFLNPEDREPLWRFPNELPIAGEPANIVALVEEYMDWLHQSPVPKLLFWGTPGVLIPPAEAARLAKSLPNCKAVDIGPGLNLLQEDNPDLIGSEIARWLSTLEISGGSGGSGGGGSGGMVFTLEDFVGDWEQTAAYNLDQVLEQGGVSSLLQNLAVSVTPIQRIVRSGENALKIDIHVIIPYEGLSADQMAQIEEVFKVVYPVDDHHFKVILPYGTLVIDGVTPNMLNYFGRPYEGIAVFDGKKITVTGTLWNGNKIIDERLITPDGSMLFRVTINS

SEQ ID NO: 3481 - protein, 448 aa, Synthetic construct
MFHYVDVGPRDGTPVLFLHGNPTSSYVWRNIIPHVAPTHRCIAPDLIGFGKSDKPDIGYFFDDHVRFMDAFIEALGLEEVVLVIHDWGSALGFHWAKRNPERVKGIAFMEFIRPIPTWDEWPEFARETFQAFRTTDVGRKLIIDQNVMIEGTLPMGVVRPLTEVEMDHYREPFLNPEDREPLWRFPNELPIAGEPANIVALVEEYMDWLHQSPVPKLLFWGTPGVLIPPAEAARLAKSLPNCKAVDIGPGLNLLQEDNPDLIGSEIARWLSTLEISGGSGGSGGGGSGGMVFTLEDFVGDWEQTAAYNLDQVLEQGGVSSLLQNLAVSVTPIQRIVRSGENALKIDIHVIIPYEGLSADQMAQIEEVFKVVYPVDDHHFKVILPYGTLVIDGVTPNMLNYFGRPYEGIAVFDGKKITVTGTLWNGNKIIDERLITPDGSMLFRVTINS

SEQ ID NO: 3482 - protein, 448 aa, Synthetic construct
MFHYVDVGPRDGTPVLFLHGNPTSSYVWRNIIPHVAPTHRCIAPDLIGFGKSDKPDLGYFFDDHVRFMDAFIEALGLEEVVLVIHDWGAALGFHWAKRNPERVKGIAFMEFIRPIPTWDEWPEFARETFQAFRTTDVGRKLIIDQNVMIEGTLPMGVVRPLTEVEMDHYREPFLNPEDREPLWRFPNELPIAGEPANIVALVEEYMDWLHQSPVPKLLFWGTPGVLIPPAEAARLAKSLPNCKAVDIGPGLNLLQEDNPDLIGSEIARWLSTLEISGGSGGSGGGGSGGMVFTLEDFVGDWEQTAAYNLDQVLEQGGVSSLLQNLAVSVTPIQRIVRSGENALKIDIHVIIPYEGLSADQMAQIEEVFKVVYPVDDHHFKVILPYGTLVIDGVTPNMLNYFGRPYEGIAVFDGKKITVTGTLWNGNKIIDERLITPDGSMLFRVTINS

SEQ ID NO: 3483 - protein, 448 aa, Synthetic construct
MFHYVDVGPRDGTPVLFLHGNPTSSYVWRNIIPHVAPTHRCIAPDLIGMGKSGKPDLGYFFDDHVRFMDAFIEALGLEEVVLVIHDWGSALGFHWAKRNPERVKGIAFMEFIRPIPTWDEWPEFAREMFQAFRTTDVGRKLIIDQNVMIEGTLPMGVVRPLTEVEMDHYREPFLNPEDREPLWRFPNELPIAGEPANIVALVEEYMDWLHQSPVPKLLFWGTPGVLIPPAEAARLAKSLPNCKAVDIGPGLNLLQEDNPDLIGSEIARWLSTLEISGGSGGSGGGGSGGMVFTLEDFVGDWEQTAAYNLDQVLEQGGVSSLLQNLAVSVTPIQRIVRSGENALKIDIHVIIPYEGLSADQMAQIEEVFKVVYPVDDHHFKVILPYGTLVIDGVTPNMLNYFGRPYEGIAVFDGKKITVTGTLWNGNKIIDERLITPDGSMLFRVTINS

SEQ ID NO: 3484 - protein, 448 aa, Synthetic construct
MFHYVDVGPRDGTPVLFLHGNPTSSYVWRNIIPHVAPTHRCIAPDLIGMGKSGKPDLGYFFDDHVRFMDAFIEALGLEEVVLVIHDWGSALGFHWAKRNPERVKGIAFMEFIRPIPTWDEWPEFARETFQAFRTTDVGRKLIIDQNVMIEGTLPMGVVRPLTEVEMDHYREPFLNPEDREPLWRFANELPIAGEPANIVALVEEYMDWLHQSPVPKLLFWGTPGVLIPPAEAARLAKSLPNCKAVDIGPGLNLLQEDNPDLIGSEIARWLSTLEISGGSGGSGGGGSGGMVFTLEDFVGDWEQTAAYNLDQVLEQGGVSSLLQNLAVSVTPIQRIVRSGENALKIDIHVIIPYEGLSADQMAQIEEVFKVVYPVDDHHFKVILPYGTLVIDGVTPNMLNYFGRPYEGIAVFDGKKITVTGTLWNGNKIIDERLITPDGSMLFRVTINS

SEQ ID NO: 3485 - protein, 448 aa, Synthetic construct
MFHYVDVGPRDGTPVLFLHGNPTSSYVWRNIIPHVAPTHRCIAPDLIGMGKSSKPPLGYFFDDHVRFMDAFIEALGLEEVVLVIHDWGSALGFHWAKRNPERVKGIAFMEFIRPIPTWDEWPEFARETFQAFRTTDVGRKLIIDQNVMIEGTLPMGVVRPLTEVEMDHYREPFLNPEDREPLWRFPNELPIAGEPANIVALVEEYMDWLHQSPVPKLLFWGTPGVLIPPAEAARLAKSLPNCKAVDIGPGLNLLQEDNPDLIGSEIARWLSTLEISGGSGGSGGGGSGGMVFTLEDFVGDWEQTAAYNLDQVLEQGGVSSLLQNLAVSVTPIQRIVRSGENALKIDIHVIIPYEGLSADQMAQIEEVFKVVYPVDDHHFKVILPYGTLVIDGVTPNMLNYFGRPYEGIAVFDGKKITVTGTLWNGNKIIDERLITPDGSMLFRVTINS

SEQ ID NO: 3486 - protein, 448 aa, Synthetic construct
MFHYVDVGPRDGTPVLFLHGNPTSSYVWRNIIPHVAPTHRCIAPDLIGMGKSSKPDIGYFFDDHVRFMDAFIEALGLEEVVLVIHDWGSALGFHWAKRNPERVKGIAFMEFIRPIPTWDEWPEFARETFQAFRTTDVGRKLIIDQNVMIEGTLPMGVVRPLTEVEMDHYREPFLNPEDREPLWRFPNELPIAGEPANIVALVEEYMDWLHQSPVPKLLFWGTPGVLIPPAEAARLAKSLPNCKAVDIGPGLNLLQEDNPDLIGSEIARWLSTLEISGGSGGSGGGGSGGMVFTLEDFVGDWEQTAAYNLDQVLEQGGVSSLLQNLAVSVTPIQRIVRSGENALKIDIHVIIPYEGLSADQMAQIEEVFKVVYPVDDHHFKVILPYGTLVIDGVTPNMLNYFGRPYEGIAVFDGKKITVTGTLWNGNKIIDERLITPDGSMLFRVTINS

SEQ ID NO: 3487 - protein, 448 aa, Synthetic construct
MFHYVDVGPRDGTPVLFLHGNPTSSYVWRNIIPHVAPTHRCIAPDLIGMGKSSKPDLGYFFDDHVRFMDAFIEALGLEEVVLVIHDWGAALGFHWAKRNPERVKGIAFMEFIRPIPTWDEWPEFARETFQAFRTTDVGRKLIIDQNVMIEGTLPMGVVRPLTEVEMDHYREPFLNPEDREPLWRFPNELPIAGEPANIVALVEEYMDWLHQSPVPKLLFWGTPGVLIPPAEAARLAKSLPNCKAVDIGPGLNLLQEDNPDLIGSEIARWLSTLEISGGSGGSGGGGSGGMVFTLEDFVGDWEQTAAYNLDQVLEQGGVSSLLQNLAVSVTPIQRIVRSGENALKIDIHVIIPYEGLSADQMAQIEEVFKVVYPVDDHHFKVILPYGTLVIDGVTPNMLNYFGRPYEGIAVFDGKKITVTGTLWNGNKIIDERLITPDGSMLFRVTINS

SEQ ID NO: 3488 - protein, 448 aa, Synthetic construct
MFHYVDVGPRDGTPVLFLHGNPTSSYVWRNIIPHVAPTHRCIAPDLIGMGKSSKPDLGYFFDDHVRFMDAFIEALGLEEVVLVIHDWGSALGFHWAKRNPERVKGIAFMEFIRPIPTWDEWPEFARETFQAFRTTDVGRKLIIDQNVMIEGTLPMGVVRPLTEVEMDHYREPFLNPEDREPLWRFANELPIAGEPANIVALVEEYMDWLHQSPVPKLLFWGTPGVLIPPAEAARLAKSLPNCKAVDIGPGLNLLQEDNPDLIGSEIARWLSTLEISGGSGGSGGGGSGGMVFTLEDFVGDWEQTAAYNLDQVLEQGGVSSLLQNLAVSVTPIQRIVRSGENALKIDIHVIIPYEGLSADQMAQIEEVFKVVYPVDDHHFKVILPYGTLVIDGVTPNMLNYFGRPYEGIAVFDGKKITVTGTLWNGNKIIDERLITPDGSMLFRVTINS

SEQ ID NO: 3489 - protein, 448 aa, Synthetic construct
MFHYVDVGPRDGTPVLFLHGNPTSSYVWRNIIPHVAPTHRCIAPDLIGMGKSSKPDLGYFFDDHVRFMDAFIEALGLEEVVLVIHDWGSALGFHWAKRNPERVKGIAFMEFIRPIPTWDEWPEFARETFQAFRTTDVGRKLIIDQNVMIEGTLPMGVVRPLTEVEMDHYREPFLNPEDREPLWRFPNELPIAGEPANIVALVEEYMDWLHQSPVPKLLFWGTPGVLIPPAEAARLAKSLPNCKAVDIGPGLNILQEDNPDLIGSEIARWLSTLEISGGSGGSGGGGSGGMVFTLEDFVGDWEQTAAYNLDQVLEQGGVSSLLQNLAVSVTPIQRIVRSGENALKIDIHVIIPYEGLSADQMAQIEEVFKVVYPVDDHHFKVILPYGTLVIDGVTPNMLNYFGRPYEGIAVFDGKKITVTGTLWNGNKIIDERLITPDGSMLFRVTINS

SEQ ID NO: 3490 - protein, 448 aa, Synthetic construct
MFHYVDVGPRDGTPVLFLHGNPTSSYVWRNIIPHVAPTHRCIAPDLIGMGKSDKPDIGYFFDDHVRFMDAFIEALGLEEVVLVIHDWGAALGFHWAKRNPERVKGIAFMEFIRPIPTWDEWPEFARETFQAFRTTDVGRKLIIDQNVMIEGTLPMGVVRPLTEVEMDHYREPFLNPEDREPLWRFPNELPIAGEPANIVALVEEYMDWLHQSPVPKLLFWGTPGVLIPPAEAARLAKSLPNCKAVDIGPGLNLLQEDNPDLIGSEIARWLSTLEISGGSGGSGGGGSGGMVFTLEDFVGDWEQTAAYNLDQVLEQGGVSSLLQNLAVSVTPIQRIVRSGENALKIDIHVIIPYEGLSADQMAQIEEVFKVVYPVDDHHFKVILPYGTLVIDGVTPNMLNYFGRPYEGIAVFDGKKITVTGTLWNGNKIIDERLITPDGSMLFRVTINS

SEQ ID NO: 3491 - protein, 448 aa, Synthetic construct
MFHYVDVGPRDGTPVLFLHGNPTSSYVWRNIIPHVAPTHRCIAPDLIGMGKSDKPDIGYFFDDHVRFMDAFIEALGLEEVVLVIHDWGSALGFHWAKRNPERVKGIAFMEFIRPIPTWDEWPEFARETFQAFRTEDVGRKLIIDQNVMIEGTLPMGVVRPLTEVEMDHYREPFLNPEDREPLWRFPNELPIAGEPANIVALVEEYMDWLHQSPVPKLLFWGTPGVLIPPAEAARLAKSLPNCKAVDIGPGLNLLQEDNPDLIGSEIARWLSTLEISGGSGGSGGGGSGGMVFTLEDFVGDWEQTAAYNLDQVLEQGGVSSLLQNLAVSVTPIQRIVRSGENALKIDIHVIIPYEGLSADQMAQIEEVFKVVYPVDDHHFKVILPYGTLVIDGVTPNMLNYFGRPYEGIAVFDGKKITVTGTLWNGNKIIDERLITPDGSMLFRVTINS

SEQ ID NO: 3492 - protein, 448 aa, Synthetic construct
MFHYVDVGPRDGTPVLFLHGNPTSSYVWRNIIPHVAPTHRCIAPDLIGMGKSDKPDIGYFFDDHVRFMDAFIEALGLEEVVLVIHDWGSALGFHWAKRNPERVKGIAFMEFIRPIPTWDEWPEFARETFQAFRTTDVGRKLIIDQNVMIEGTLPMGVVRPLTEVEMDHYREPFLNPEDREPLWRFPNELPIAGEPANIVALVEEYMDWLHQSPVPKLLFWGTPGVLIPPAEAARLAKALPNCKAVDIGPGLNLLQEDNPDLIGSEIARWLSTLEISGGSGGSGGGGSGGMVFTLEDFVGDWEQTAAYNLDQVLEQGGVSSLLQNLAVSVTPIQRIVRSGENALKIDIHVIIPYEGLSADQMAQIEEVFKVVYPVDDHHFKVILPYGTLVIDGVTPNMLNYFGRPYEGIAVFDGKKITVTGTLWNGNKIIDERLITPDGSMLFRVTINS

SEQ ID NO: 3493 - protein, 448 aa, Synthetic construct
MFHYVDVGPRDGTPVLFLHGNPTSSYVWRNIIPHVAPTHRCIAPDLIGMGKSDKPDLGYFFDDHVRFMDAFIEALGLEEVVLVIHDWGAALGFHWAKRNPERVKGIAFMEFIRPIPTWDEWPEFARETFQAFRTEDVGRKLIIDQNVMIEGTLPMGVVRPLTEVEMDHYREPFLNPEDREPLWRFPNELPIAGEPANIVALVEEYMDWLHQSPVPKLLFWGTPGVLIPPAEAARLAKSLPNCKAVDIGPGLNLLQEDNPDLIGSEIARWLSTLEISGGSGGSGGGGSGGMVFTLEDFVGDWEQTAAYNLDQVLEQGGVSSLLQNLAVSVTPIQRIVRSGENALKIDIHVIIPYEGLSADQMAQIEEVFKVVYPVDDHHFKVILPYGTLVIDGVTPNMLNYFGRPYEGIAVFDGKKITVTGTLWNGNKIIDERLITPDGSMLFRVTINS

SEQ ID NO: 3494 - protein, 448 aa, Synthetic construct
MFHYVDVGPRDGTPVLFLHGNPTSSYVWRNIIPHVAPTHRCIAPDLIGMGKSDKPDLGYFFDDHVRFMDAFIEALGLEEVVLVIHDWGSALGLHWAKRNPERVKGIAFMEFIRPIPTWDEWPEFARETFQAFRTTDVGRKLIIDQNVMIEGTLPMGVVRPLTEVEMDHYREPFLNPEDREPLWRFANELPIAGEPANIVALVEEYMDWLHQSPVPKLLFWGTPGVLIPPAEAARLAKSLPNCKAVDIGPGLNLLQEDNPDLIGSEIARWLSTLEISGGSGGSGGGGSGGMVFTLEDFVGDWEQTAAYNLDQVLEQGGVSSLLQNLAVSVTPIQRIVRSGENALKIDIHVIIPYEGLSADQMAQIEEVFKVVYPVDDHHFKVILPYGTLVIDGVTPNMLNYFGRPYEGIAVFDGKKITVTGTLWNGNKIIDERLITPDGSMLFRVTINS

SEQ ID NO: 3495 - protein, 448 aa, Synthetic construct
MFHYVDVGPRDGTPVLFLHGNPTSSYVWRNIIPHVAPTHRCIAPDLIGMGKSDKPDLGYFFDDHVRFMDAFIEALGLEEVVLVIHDWGSALGFHWAKRNPERVKGIAFMEFIRPIPTWDEWPEFARETFQAFRTEDVGRKLIIDQNVMIEGTLPMGVVRPLTEVEMDHYREPFLNPEDREPLWRFPNELPIAGEPANIVALVEEYMDWLHQSPVPKLLFWGTPGVLIPPAEAARLAKSLPNCKAVDIGPGLNILQEDNPDLIGSEIARWLSTLEISGGSGGSGGGGSGGMVFTLEDFVGDWEQTAAYNLDQVLEQGGVSSLLQNLAVSVTPIQRIVRSGENALKIDIHVIIPYEGLSADQMAQIEEVFKVVYPVDDHHFKVILPYGTLVIDGVTPNMLNYFGRPYEGIAVFDGKKITVTGTLWNGNKIIDERLITPDGSMLFRVTINS

SEQ ID NO: 3496 - protein, 448 aa, Synthetic construct
MFHYVDVGPRDGTPVLFLHGNPTSSYVWRNIIPHVAPTHRCIAPDLIGFGKSGKPDLGYFFDDHVRFMDAFIEALGLEEVVLVIHDWGSALGFHWAKRNPERVKGIAFMEFIRPIPTWDEWPEFARETFQQFRTTDVGRKLIIDQNVMIEGTLPMGVVRPLTEVEMDHYREPFLNPVDREPLWRFPNELPIAGEPANIVALVEEYMDWLHQSPVPKLLFWGTPGVLIPPAEAARLAKSLPNCKAVDIGPGLNLLQEDNPDLIGSEIARWLSTLEISGGSGGSGGGGSGGMVFTLEDFVGDWEQTAAYNLDQVLEQGGVSSLLQNLAVSVTPIQRIVRSGENALKIDIHVIIPYEGLSADQMAQIEEVFKVVYPVDDHHFKVILPYGTLVIDGVTPNMLNYFGRPYEGIAVFDGKKITVTGTLWNGNKIIDERLITPDGSMLFRVTINS

SEQ ID NO: 3497 - protein, 448 aa, Synthetic construct
MFHYVDVGPRDGTPVLFLHGNPTSSYVWRNIIPHVAPTHRCIAPDLIGFGKSDKPDIGYFFDDHVRFMDAFIEALGLEEVVLVIHDWGSALGFHWAKRNPERVKGIAFMEFIRPIPTWDEWPEFARETFQQFRTTDVGRKLIIDQNVMIEGTLPMGVVRPLTEVEMDHYREPFLNPVDREPLWRFPNELPIAGEPANIVALVEEYMDWLHQSPVPKLLFWGTPGVLIPPAEAARLAKSLPNCKAVDIGPGLNLLQEDNPDLIGSEIARWLSTLEISGGSGGSGGGGSGGMVFTLEDFVGDWEQTAAYNLDQVLEQGGVSSLLQNLAVSVTPIQRIVRSGENALKIDIHVIIPYEGLSADQMAQIEEVFKVVYPVDDHHFKVILPYGTLVIDGVTPNMLNYFGRPYEGIAVFDGKKITVTGTLWNGNKIIDERLITPDGSMLFRVTINS

SEQ ID NO: 3498 - protein, 448 aa, Synthetic construct
MFHYVDVGPRDGTPVLFLHGNPTSSYVWRNIIPHVAPTHRCIAPDLIGFGKSDKPDLGYFFDDHVRFMDAFIEALGLEEVVLVIHDWGAALGFHWAKRNPERVKGIAFMEFIRPIPTWDEWPEFARETFQQFRTTDVGRKLIIDQNVMIEGTLPMGVVRPLTEVEMDHYREPFLNPVDREPLWRFPNELPIAGEPANIVALVEEYMDWLHQSPVPKLLFWGTPGVLIPPAEAARLAKSLPNCKAVDIGPGLNLLQEDNPDLIGSEIARWLSTLEISGGSGGSGGGGSGGMVFTLEDFVGDWEQTAAYNLDQVLEQGGVSSLLQNLAVSVTPIQRIVRSGENALKIDIHVIIPYEGLSADQMAQIEEVFKVVYPVDDHHFKVILPYGTLVIDGVTPNMLNYFGRPYEGIAVFDGKKITVTGTLWNGNKIIDERLITPDGSMLFRVTINS

SEQ ID NO: 3499 - protein, 448 aa, Synthetic construct
MFHYVDVGPRDGTPVLFLHGNPTSSYVWRNIIPHVAPTHRCIAPDLIGFGKSDKPDLGYFFDDHVRFMDAFIEALGLEEVVLVIHDWGSALGFHWAKRNPERVKGIAFMEFIRPIPTWDEWPEFARETFQQFRTTDVGRKLIIDQNVMIEGTLPMGVVRPLTEVEMDHYREPFLNPQDREPLWRFPNELPIAGEPANIVALVEEYMDWLHQSPVPKLLFWGTPGVLIPPAEAARLAKSLPNCKAVDIGPGLNLLQEDNPDLIGSEIARWLSTLEISGGSGGSGGGGSGGMVFTLEDFVGDWEQTAAYNLDQVLEQGGVSSLLQNLAVSVTPIQRIVRSGENALKIDIHVIIPYEGLSADQMAQIEEVFKVVYPVDDHHFKVILPYGTLVIDGVTPNMLNYFGRPYEGIAVFDGKKITVTGTLWNGNKIIDERLITPDGSMLFRVTINS

SEQ ID NO: 3500 - protein, 448 aa, Synthetic construct
MFHYVDVGPRDGTPVLFLHGNPTSSYVWRNIIPHVAPTHRCIAPDLIGMGKSGKPDIGYFFDDHVRFMDAFIEALGLEEVVLVIHDWGSALGFHWAKRNPERVKGIAFMEFIRPIPTWDEWPEFARETFQQFRTTDVGRKLIIDQNVMIEGTLPMGVVRPLTEVEMDHYREPFLNPVDREPLWRFPNELPIAGEPANIVALVEEYMDWLHQSPVPKLLFWGTPGVLIPPAEAARLAKSLPNCKAVDIGPGLNLLQEDNPDLIGSEIARWLSTLEISGGSGGSGGGGSGGMVFTLEDFVGDWEQTAAYNLDQVLEQGGVSSLLQNLAVSVTPIQRIVRSGENALKIDIHVIIPYEGLSADQMAQIEEVFKVVYPVDDHHFKVILPYGTLVIDGVTPNMLNYFGRPYEGIAVFDGKKITVTGTLWNGNKIIDERLITPDGSMLFRVTINS

SEQ ID NO: 3501 - protein, 448 aa, Synthetic construct
MFHYVDVGPRDGTPVLFLHGNPTSSYVWRNIIPHVAPTHRCIAPDLIGMGKSGKPDLGYFFDDHVRFMDAFIEALGLEEVVLVIHDWGSALGFHWAKRNPERVKGIAFMEFIRPIPTWDEWPEFAREMFQQFRTTDVGRKLIIDQNVMIEGTLPMGVVRPLTEVEMDHYREPFLNPVDREPLWRFPNELPIAGEPANIVALVEEYMDWLHQSPVPKLLFWGTPGVLIPPAEAARLAKSLPNCKAVDIGPGLNLLQEDNPDLIGSEIARWLSTLEISGGSGGSGGGGSGGMVFTLEDFVGDWEQTAAYNLDQVLEQGGVSSLLQNLAVSVTPIQRIVRSGENALKIDIHVIIPYEGLSADQMAQIEEVFKVVYPVDDHHFKVILPYGTLVIDGVTPNMLNYFGRPYEGIAVFDGKKITVTGTLWNGNKIIDERLITPDGSMLFRVTINS

SEQ ID NO: 3502 - protein, 448 aa, Synthetic construct
MFHYVDVGPRDGTPVLFLHGNPTSSYVWRNIIPHVAPTHRCIAPDLIGMGKSGKPDLGYFFDDHVRFMDAFIEALGLEEVVLVIHDWGSALGFHWAKRNPERVKGIAFMEFIRPIPTWDEWPEFARETFQQFRTTDVGRKLIIDQNVMIEGTLPMGVVRPLTEVEMDHYREPFLNPEDREPLWRFPNELPIAGEPANIVALVEEYMDWLHQSPVPKLLFWGTPGVLIPPAEAARLAKSLPNCKAVDIGPGLNLLQEDNPDLIGSEIARWLSTLEISGGSGGSGGGGSGGMVFTLEDFVGDWEQTAAYNLDQVLEQGGVSSLLQNLAVSVTPIQRIVRSGENALKIDIHVIIPYEGLSADQMAQIEEVFKVVYPVDDHHFKVILPYGTLVIDGVTPNMLNYFGRPYEGIAVFDGKKITVTGTLWNGNKIIDERLITPDGSMLFRVTINS

SEQ ID NO: 3503 - protein, 448 aa, Synthetic construct
MFHYVDVGPRDGTPVLFLHGNPTSSYVWRNIIPHVAPTHRCIAPDLIGMGKSGKPDLGYFFDDHVRFMDAFIEALGLEEVVLVIHDWGSALGFHWAKRNPERVKGIAFMEFIRPIPTWDEWPEFARETFQQFRTTDVGRKLIIDQNVMIEGTLPMGVVRPLTEVEMDHYREPFLNPVDREPLWRFANELPIAGEPANIVALVEEYMDWLHQSPVPKLLFWGTPGVLIPPAEAARLAKSLPNCKAVDIGPGLNLLQEDNPDLIGSEIARWLSTLEISGGSGGSGGGGSGGMVFTLEDFVGDWEQTAAYNLDQVLEQGGVSSLLQNLAVSVTPIQRIVRSGENALKIDIHVIIPYEGLSADQMAQIEEVFKVVYPVDDHHFKVILPYGTLVIDGVTPNMLNYFGRPYEGIAVFDGKKITVTGTLWNGNKIIDERLITPDGSMLFRVTINS

SEQ ID NO: 3504 - protein, 448 aa, Synthetic construct
MFHYVDVGPRDGTPVLFLHGNPTSSYVWRNIIPHVAPTHRCIAPDLIGMGKSSKPPLGYFFDDHVRFMDAFIEALGLEEVVLVIHDWGSALGFHWAKRNPERVKGIAFMEFIRPIPTWDEWPEFARETFQQFRTTDVGRKLIIDQNVMIEGTLPMGVVRPLTEVEMDHYREPFLNPVDREPLWRFPNELPIAGEPANIVALVEEYMDWLHQSPVPKLLFWGTPGVLIPPAEAARLAKSLPNCKAVDIGPGLNLLQEDNPDLIGSEIARWLSTLEISGGSGGSGGGGSGGMVFTLEDFVGDWEQTAAYNLDQVLEQGGVSSLLQNLAVSVTPIQRIVRSGENALKIDIHVIIPYEGLSADQMAQIEEVFKVVYPVDDHHFKVILPYGTLVIDGVTPNMLNYFGRPYEGIAVFDGKKITVTGTLWNGNKIIDERLITPDGSMLFRVTINS

SEQ ID NO: 3505 - protein, 448 aa, Synthetic construct
MFHYVDVGPRDGTPVLFLHGNPTSSYVWRNIIPHVAPTHRCIAPDLIGMGKSSKPDIGYFFDDHVRFMDAFIEALGLEEVVLVIHDWGSALGFHWAKRNPERVKGIAFMEFIRPIPTWDEWPEFARETFQQFRTTDVGRKLIIDQNVMIEGTLPMGVVRPLTEVEMDHYREPFLNPVDREPLWRFPNELPIAGEPANIVALVEEYMDWLHQSPVPKLLFWGTPGVLIPPAEAARLAKSLPNCKAVDIGPGLNLLQEDNPDLIGSEIARWLSTLEISGGSGGSGGGGSGGMVFTLEDFVGDWEQTAAYNLDQVLEQGGVSSLLQNLAVSVTPIQRIVRSGENALKIDIHVIIPYEGLSADQMAQIEEVFKVVYPVDDHHFKVILPYGTLVIDGVTPNMLNYFGRPYEGIAVFDGKKITVTGTLWNGNKIIDERLITPDGSMLFRVTINS

SEQ ID NO: 3506 - protein, 448 aa, Synthetic construct
MFHYVDVGPRDGTPVLFLHGNPTSSYVWRNIIPHVAPTHRCIAPDLIGMGKSSKPDLGYFFDDHVRFMDAFIEALGLEEVVLVIHDWGAALGFHWAKRNPERVKGIAFMEFIRPIPTWDEWPEFARETFQQFRTTDVGRKLIIDQNVMIEGTLPMGVVRPLTEVEMDHYREPFLNPVDREPLWRFPNELPIAGEPANIVALVEEYMDWLHQSPVPKLLFWGTPGVLIPPAEAARLAKSLPNCKAVDIGPGLNLLQEDNPDLIGSEIARWLSTLEISGGSGGSGGGGSGGMVFTLEDFVGDWEQTAAYNLDQVLEQGGVSSLLQNLAVSVTPIQRIVRSGENALKIDIHVIIPYEGLSADQMAQIEEVFKVVYPVDDHHFKVILPYGTLVIDGVTPNMLNYFGRPYEGIAVFDGKKITVTGTLWNGNKIIDERLITPDGSMLFRVTINS

SEQ ID NO: 3507 - protein, 448 aa, Synthetic construct
MFHYVDVGPRDGTPVLFLHGNPTSSYVWRNIIPHVAPTHRCIAPDLIGMGKSSKPDLGYFFDDHVRFMDAFIEALGLEEVVLVIHDWGSALGFHWAKRNPERVKGIAFMEFIRPIPTWDEWPEFARETFQQFRTTDVGRKLIIDQNVMIEGTLPMGVVRPLTEVEMDHYREPFLNPEDREPLWRFPNELPIAGEPANIVALVEEYMDWLHQSPVPKLLFWGTPGVLIPPAEAARLAKSLPNCKAVDIGPGLNLLQEDNPDLIGSEIARWLSTLEISGGSGGSGGGGSGGMVFTLEDFVGDWEQTAAYNLDQVLEQGGVSSLLQNLAVSVTPIQRIVRSGENALKIDIHVIIPYEGLSADQMAQIEEVFKVVYPVDDHHFKVILPYGTLVIDGVTPNMLNYFGRPYEGIAVFDGKKITVTGTLWNGNKIIDERLITPDGSMLFRVTINS

SEQ ID NO: 3508 - protein, 448 aa, Synthetic construct
MFHYVDVGPRDGTPVLFLHGNPTSSYVWRNIIPHVAPTHRCIAPDLIGMGKSSKPDLGYFFDDHVRFMDAFIEALGLEEVVLVIHDWGSALGFHWAKRNPERVKGIAFMEFIRPIPTWDEWPEFARETFQQFRTTDVGRKLIIDQNVMIEGTLPMGVVRPLTEVEMDHYREPFLNPVDREPLWRFANELPIAGEPANIVALVEEYMDWLHQSPVPKLLFWGTPGVLIPPAEAARLAKSLPNCKAVDIGPGLNLLQEDNPDLIGSEIARWLSTLEISGGSGGSGGGGSGGMVFTLEDFVGDWEQTAAYNLDQVLEQGGVSSLLQNLAVSVTPIQRIVRSGENALKIDIHVIIPYEGLSADQMAQIEEVFKVVYPVDDHHFKVILPYGTLVIDGVTPNMLNYFGRPYEGIAVFDGKKITVTGTLWNGNKIIDERLITPDGSMLFRVTINS

SEQ ID NO: 3509 - protein, 448 aa, Synthetic construct
MFHYVDVGPRDGTPVLFLHGNPTSSYVWRNIIPHVAPTHRCIAPDLIGMGKSSKPDLGYFFDDHVRFMDAFIEALGLEEVVLVIHDWGSALGFHWAKRNPERVKGIAFMEFIRPIPTWDEWPEFARETFQQFRTTDVGRKLIIDQNVMIEGTLPMGVVRPLTEVEMDHYREPFLNPVDREPLWRFPNELPIAGEPANIVALVEEYMDWLHQSPVPKLLFWGTPGVLIPPAEAARLAKSLPNCKAVDIGPGLNILQEDNPDLIGSEIARWLSTLEISGGSGGSGGGGSGGMVFTLEDFVGDWEQTAAYNLDQVLEQGGVSSLLQNLAVSVTPIQRIVRSGENALKIDIHVIIPYEGLSADQMAQIEEVFKVVYPVDDHHFKVILPYGTLVIDGVTPNMLNYFGRPYEGIAVFDGKKITVTGTLWNGNKIIDERLITPDGSMLFRVTINS

SEQ ID NO: 3510 - protein, 448 aa, Synthetic construct
MFHYVDVGPRDGTPVLFLHGNPTSSYVWRNIIPHVAPTHRCIAPDLIGMGKSDKPDIGYFFDDHVRFMDAFIEALGLEEVVLVIHDWGAALGFHWAKRNPERVKGIAFMEFIRPIPTWDEWPEFARETFQQFRTTDVGRKLIIDQNVMIEGTLPMGVVRPLTEVEMDHYREPFLNPVDREPLWRFPNELPIAGEPANIVALVEEYMDWLHQSPVPKLLFWGTPGVLIPPAEAARLAKSLPNCKAVDIGPGLNLLQEDNPDLIGSEIARWLSTLEISGGSGGSGGGGSGGMVFTLEDFVGDWEQTAAYNLDQVLEQGGVSSLLQNLAVSVTPIQRIVRSGENALKIDIHVIIPYEGLSADQMAQIEEVFKVVYPVDDHHFKVILPYGTLVIDGVTPNMLNYFGRPYEGIAVFDGKKITVTGTLWNGNKIIDERLITPDGSMLFRVTINS

SEQ ID NO: 3511 - protein, 448 aa, Synthetic construct
MFHYVDVGPRDGTPVLFLHGNPTSSYVWRNIIPHVAPTHRCIAPDLIGMGKSDKPDIGYFFDDHVRFMDAFIEALGLEEVVLVIHDWGSALGFHWAKRNPERVKGIAFMEFIRPIPTWDEWPEFARETFQQFRTTDVGRKLIIDQNVMIEGTLPMGVVRPLTEVEMDHYREPFLNPEDREPLWRFPNELPIAGEPANIVALVEEYMDWLHQSPVPKLLFWGTPGVLIPPAEAARLAKSLPNCKAVDIGPGLNLLQEDNPDLIGSEIARWLSTLEISGGSGGSGGGGSGGMVFTLEDFVGDWEQTAAYNLDQVLEQGGVSSLLQNLAVSVTPIQRIVRSGENALKIDIHVIIPYEGLSADQMAQIEEVFKVVYPVDDHHFKVILPYGTLVIDGVTPNMLNYFGRPYEGIAVFDGKKITVTGTLWNGNKIIDERLITPDGSMLFRVTINS

SEQ ID NO: 3512 - protein, 448 aa, Synthetic construct
MFHYVDVGPRDGTPVLFLHGNPTSSYVWRNIIPHVAPTHRCIAPDLIGMGKSDKPDIGYFFDDHVRFMDAFIEALGLEEVVLVIHDWGSALGFHWAKRNPERVKGIAFMEFIRPIPTWDEWPEFARETFQQFRTEDVGRKLIIDQNVMIEGTLPMGVVRPLTEVEMDHYREPFLNPVDREPLWRFPNELPIAGEPANIVALVEEYMDWLHQSPVPKLLFWGTPGVLIPPAEAARLAKSLPNCKAVDIGPGLNLLQEDNPDLIGSEIARWLSTLEISGGSGGSGGGGSGGMVFTLEDFVGDWEQTAAYNLDQVLEQGGVSSLLQNLAVSVTPIQRIVRSGENALKIDIHVIIPYEGLSADQMAQIEEVFKVVYPVDDHHFKVILPYGTLVIDGVTPNMLNYFGRPYEGIAVFDGKKITVTGTLWNGNKIIDERLITPDGSMLFRVTINS

SEQ ID NO: 3513 - protein, 448 aa, Synthetic construct
MFHYVDVGPRDGTPVLFLHGNPTSSYVWRNIIPHVAPTHRCIAPDLIGMGKSDKPDIGYFFDDHVRFMDAFIEALGLEEVVLVIHDWGSALGFHWAKRNPERVKGIAFMEFIRPIPTWDEWPEFARETFQQFRTTDVGRKLIIDQNVMIEGTLPMGVVRPLTEVEMDHYREPFLNPVDREPLWRFPNELPIAGEPANIVALVEEYMDWLHQSPVPKLLFWGTPGVLIPPAEAARLAKALPNCKAVDIGPGLNLLQEDNPDLIGSEIARWLSTLEISGGSGGSGGGGSGGMVFTLEDFVGDWEQTAAYNLDQVLEQGGVSSLLQNLAVSVTPIQRIVRSGENALKIDIHVIIPYEGLSADQMAQIEEVFKVVYPVDDHHFKVILPYGTLVIDGVTPNMLNYFGRPYEGIAVFDGKKITVTGTLWNGNKIIDERLITPDGSMLFRVTINS

SEQ ID NO: 3514 - protein, 448 aa, Synthetic construct
MFHYVDVGPRDGTPVLFLHGNPTSSYVWRNIIPHVAPTHRCIAPDLIGMGKSDKPDLGYFFDDHVRFMDAFIEALGLEEVVLVIHDWGAALGFHWAKRNPERVKGIAFMEFIRPIPTWDEWPEFARETFQQFRTEDVGRKLIIDQNVMIEGTLPMGVVRPLTEVEMDHYREPFLNPVDREPLWRFPNELPIAGEPANIVALVEEYMDWLHQSPVPKLLFWGTPGVLIPPAEAARLAKSLPNCKAVDIGPGLNLLQEDNPDLIGSEIARWLSTLEISGGSGGSGGGGSGGMVFTLEDFVGDWEQTAAYNLDQVLEQGGVSSLLQNLAVSVTPIQRIVRSGENALKIDIHVIIPYEGLSADQMAQIEEVFKVVYPVDDHHFKVILPYGTLVIDGVTPNMLNYFGRPYEGIAVFDGKKITVTGTLWNGNKIIDERLITPDGSMLFRVTINS

SEQ ID NO: 3515 - protein, 448 aa, Synthetic construct
MFHYVDVGPRDGTPVLFLHGNPTSSYVWRNIIPHVAPTHRCIAPDLIGMGKSDKPDLGYFFDDHVRFMDAFIEALGLEEVVLVIHDWGAALGFHWAKRNPERVKGIAFMEFIRPIPTWDEWPEFARETFQQFRTTDVGRKLIIDQNVMIEGTLPMGVVRPLTEVEMDHYREPFLNPEDREPLWRFPNELPIAGEPANIVALVEEYMDWLHQSPVPKLLFWGTPGVLIPPAEAARLAKSLPNCKAVDIGPGLNLLQEDNPDLIGSEIARWLSTLEISGGSGGSGGGGSGGMVFTLEDFVGDWEQTAAYNLDQVLEQGGVSSLLQNLAVSVTPIQRIVRSGENALKIDIHVIIPYEGLSADQMAQIEEVFKVVYPVDDHHFKVILPYGTLVIDGVTPNMLNYFGRPYEGIAVFDGKKITVTGTLWNGNKIIDERLITPDGSMLFRVTINS

SEQ ID NO: 3516 - protein, 448 aa, Synthetic construct
MFHYVDVGPRDGTPVLFLHGNPTSSYVWRNIIPHVAPTHRCIAPDLIGMGKSDKPDLGYFFDDHVRFMDAFIEALGLEEVVLVIHDWGSALGLHWAKRNPERVKGIAFMEFIRPIPTWDEWPEFARETFQQFRTTDVGRKLIIDQNVMIEGTLPMGVVRPLTEVEMDHYREPFLNPVDREPLWRFANELPIAGEPANIVALVEEYMDWLHQSPVPKLLFWGTPGVLIPPAEAARLAKSLPNCKAVDIGPGLNLLQEDNPDLIGSEIARWLSTLEISGGSGGSGGGGSGGMVFTLEDFVGDWEQTAAYNLDQVLEQGGVSSLLQNLAVSVTPIQRIVRSGENALKIDIHVIIPYEGLSADQMAQIEEVFKVVYPVDDHHFKVILPYGTLVIDGVTPNMLNYFGRPYEGIAVFDGKKITVTGTLWNGNKIIDERLITPDGSMLFRVTINS

SEQ ID NO: 3517 - protein, 448 aa, Synthetic construct
MFHYVDVGPRDGTPVLFLHGNPTSSYVWRNIIPHVAPTHRCIAPDLIGMGKSDKPDLGYFFDDHVRFMDAFIEALGLEEVVLVIHDWGSALGFHWAKRNPERVKGIAFMEFIRPIPTWDEWPEFARETFQQFRTEDVGRKLIIDQNVMIEGTLPMGVVRPLTEVEMDHYREPFLNPVDREPLWRFPNELPIAGEPANIVALVEEYMDWLHQSPVPKLLFWGTPGVLIPPAEAARLAKSLPNCKAVDIGPGLNILQEDNPDLIGSEIARWLSTLEISGGSGGSGGGGSGGMVFTLEDFVGDWEQTAAYNLDQVLEQGGVSSLLQNLAVSVTPIQRIVRSGENALKIDIHVIIPYEGLSADQMAQIEEVFKVVYPVDDHHFKVILPYGTLVIDGVTPNMLNYFGRPYEGIAVFDGKKITVTGTLWNGNKIIDERLITPDGSMLFRVTINS

SEQ ID NO: 3518 - protein, 448 aa, Synthetic construct
MFHYVDVGPRDGTPVLFLHGNPTSSYVWRNIIPHVAPTHRCIAPDLIGFGKSGKPDLGYFFDDHVRFMDAFIEALGLEEVVLVIHDWGSALGFHWAKRNPERVKGIAFMEFIRPIPTWDEWPEFARETFQQFRTTDVGRKLIIDQNVFIEGTLPMGVVRPLTEVEMDHYREPFLNPQDREPLWRFPNELPIAGEPANIVALVEEYMDWLHQSPVPKLLFWGTPGVLIPPAEAARLAKSLPNCKAVDIGPGLNLLQEDNPDLIGSEIARWLSTLEISGGSGGSGGGGSGGMVFTLEDFVGDWEQTAAYNLDQVLEQGGVSSLLQNLAVSVTPIQRIVRSGENALKIDIHVIIPYEGLSADQMAQIEEVFKVVYPVDDHHFKVILPYGTLVIDGVTPNMLNYFGRPYEGIAVFDGKKITVTGTLWNGNKIIDERLITPDGSMLFRVTINS

SEQ ID NO: 3519 - protein, 448 aa, Synthetic construct
MFHYVDVGPRDGTPVLFLHGNPTSSYVWRNIIPHVAPTHRCIAPDLIGFGKSDKPDIGYFFDDHVRFMDAFIEALGLEEVVLVIHDWGSALGFHWAKRNPERVKGIAFMEFIRPIPTWDEWPEFARETFQQFRTTDVGRKLIIDQNVFIEGTLPMGVVRPLTEVEMDHYREPFLNPQDREPLWRFPNELPIAGEPANIVALVEEYMDWLHQSPVPKLLFWGTPGVLIPPAEAARLAKSLPNCKAVDIGPGLNLLQEDNPDLIGSEIARWLSTLEISGGSGGSGGGGSGGMVFTLEDFVGDWEQTAAYNLDQVLEQGGVSSLLQNLAVSVTPIQRIVRSGENALKIDIHVIIPYEGLSADQMAQIEEVFKVVYPVDDHHFKVILPYGTLVIDGVTPNMLNYFGRPYEGIAVFDGKKITVTGTLWNGNKIIDERLITPDGSMLFRVTINS

SEQ ID NO: 3520 - protein, 448 aa, Synthetic construct
MFHYVDVGPRDGTPVLFLHGNPTSSYVWRNIIPHVAPTHRCIAPDLIGFGKSDKPDLGYFFDDHVRFMDAFIEALGLEEVVLVIHDWGAALGFHWAKRNPERVKGIAFMEFIRPIPTWDEWPEFARETFQQFRTTDVGRKLIIDQNVFIEGTLPMGVVRPLTEVEMDHYREPFLNPQDREPLWRFPNELPIAGEPANIVALVEEYMDWLHQSPVPKLLFWGTPGVLIPPAEAARLAKSLPNCKAVDIGPGLNLLQEDNPDLIGSEIARWLSTLEISGGSGGSGGGGSGGMVFTLEDFVGDWEQTAAYNLDQVLEQGGVSSLLQNLAVSVTPIQRIVRSGENALKIDIHVIIPYEGLSADQMAQIEEVFKVVYPVDDHHFKVILPYGTLVIDGVTPNMLNYFGRPYEGIAVFDGKKITVTGTLWNGNKIIDERLITPDGSMLFRVTINS

SEQ ID NO: 3521 - protein, 448 aa, Synthetic construct
MFHYVDVGPRDGTPVLFLHGNPTSSYVWRNIIPHVAPTHRCIAPDLIGMGKSGKPDIGYFFDDHVRFMDAFIEALGLEEVVLVIHDWGSALGFHWAKRNPERVKGIAFMEFIRPIPTWDEWPEFARETFQQFRTTDVGRKLIIDQNVFIEGTLPMGVVRPLTEVEMDHYREPFLNPQDREPLWRFPNELPIAGEPANIVALVEEYMDWLHQSPVPKLLFWGTPGVLIPPAEAARLAKSLPNCKAVDIGPGLNLLQEDNPDLIGSEIARWLSTLEISGGSGGSGGGGSGGMVFTLEDFVGDWEQTAAYNLDQVLEQGGVSSLLQNLAVSVTPIQRIVRSGENALKIDIHVIIPYEGLSADQMAQIEEVFKVVYPVDDHHFKVILPYGTLVIDGVTPNMLNYFGRPYEGIAVFDGKKITVTGTLWNGNKIIDERLITPDGSMLFRVTINS

SEQ ID NO: 3522 - protein, 448 aa, Synthetic construct
MFHYVDVGPRDGTPVLFLHGNPTSSYVWRNIIPHVAPTHRCIAPDLIGMGKSGKPDLGYFFDDHVRFMDAFIEALGLEEVVLVIHDWGSALGFHWAKRNPERVKGIAFMEFIRPIPTWDEWPEFAREMFQQFRTTDVGRKLIIDQNVFIEGTLPMGVVRPLTEVEMDHYREPFLNPQDREPLWRFPNELPIAGEPANIVALVEEYMDWLHQSPVPKLLFWGTPGVLIPPAEAARLAKSLPNCKAVDIGPGLNLLQEDNPDLIGSEIARWLSTLEISGGSGGSGGGGSGGMVFTLEDFVGDWEQTAAYNLDQVLEQGGVSSLLQNLAVSVTPIQRIVRSGENALKIDIHVIIPYEGLSADQMAQIEEVFKVVYPVDDHHFKVILPYGTLVIDGVTPNMLNYFGRPYEGIAVFDGKKITVTGTLWNGNKIIDERLITPDGSMLFRVTINS

SEQ ID NO: 3523 - protein, 448 aa, Synthetic construct
MFHYVDVGPRDGTPVLFLHGNPTSSYVWRNIIPHVAPTHRCIAPDLIGMGKSGKPDLGYFFDDHVRFMDAFIEALGLEEVVLVIHDWGSALGFHWAKRNPERVKGIAFMEFIRPIPTWDEWPEFARETFQQFRTTDVGRKLIIDQNVMIEGTLPMGVVRPLTEVEMDHYREPFLNPQDREPLWRFPNELPIAGEPANIVALVEEYMDWLHQSPVPKLLFWGTPGVLIPPAEAARLAKSLPNCKAVDIGPGLNLLQEDNPDLIGSEIARWLSTLEISGGSGGSGGGGSGGMVFTLEDFVGDWEQTAAYNLDQVLEQGGVSSLLQNLAVSVTPIQRIVRSGENALKIDIHVIIPYEGLSADQMAQIEEVFKVVYPVDDHHFKVILPYGTLVIDGVTPNMLNYFGRPYEGIAVFDGKKITVTGTLWNGNKIIDERLITPDGSMLFRVTINS

SEQ ID NO: 3524 - protein, 448 aa, Synthetic construct
MFHYVDVGPRDGTPVLFLHGNPTSSYVWRNIIPHVAPTHRCIAPDLIGMGKSGKPDLGYFFDDHVRFMDAFIEALGLEEVVLVIHDWGSALGFHWAKRNPERVKGIAFMEFIRPIPTWDEWPEFARETFQQFRTTDVGRKLIIDQNVFIEGTLPMGVVRPLTEVEMDHYREPFLNPQDREPLWRFPNELPIAGEPANIVALVEEYMDWLHQSPVPKLLFWGTPGVLIPPAEAARLAKSLPNCKAVDIGPGLNLLQEDNPDLIGSEIARWLSTLEISGGSGGSGGGGSGGMVFTLEDFVGDWEQTAAYNLDQVLEQGGVSSLLQNLAVSVTPIQRIVRSGENALKIDIHVIIPYEGLSADQMAQIEEVFKVVYPVDDHHFKVILPYGTLVIDGVTPNMLNYFGRPYEGIAVFDGKKITVTGTLWNGNKIIDERLITPDGSMLFRVTINS

SEQ ID NO: 3525 - protein, 448 aa, Synthetic construct
MFHYVDVGPRDGTPVLFLHGNPTSSYVWRNIIPHVAPTHRCIAPDLIGMGKSGKPDLGYFFDDHVRFMDAFIEALGLEEVVLVIHDWGSALGFHWAKRNPERVKGIAFMEFIRPIPTWDEWPEFARETFQQFRTTDVGRKLIIDQNVFIEGTLPMGVVRPLTEVEMDHYREPFLNPQDREPLWRFANELPIAGEPANIVALVEEYMDWLHQSPVPKLLFWGTPGVLIPPAEAARLAKSLPNCKAVDIGPGLNLLQEDNPDLIGSEIARWLSTLEISGGSGGSGGGGSGGMVFTLEDFVGDWEQTAAYNLDQVLEQGGVSSLLQNLAVSVTPIQRIVRSGENALKIDIHVIIPYEGLSADQMAQIEEVFKVVYPVDDHHFKVILPYGTLVIDGVTPNMLNYFGRPYEGIAVFDGKKITVTGTLWNGNKIIDERLITPDGSMLFRVTINS

SEQ ID NO: 3526 - protein, 448 aa, Synthetic construct
MFHYVDVGPRDGTPVLFLHGNPTSSYVWRNIIPHVAPTHRCIAPDLIGMGKSSKPPLGYFFDDHVRFMDAFIEALGLEEVVLVIHDWGSALGFHWAKRNPERVKGIAFMEFIRPIPTWDEWPEFARETFQQFRTTDVGRKLIIDQNVFIEGTLPMGVVRPLTEVEMDHYREPFLNPQDREPLWRFPNELPIAGEPANIVALVEEYMDWLHQSPVPKLLFWGTPGVLIPPAEAARLAKSLPNCKAVDIGPGLNLLQEDNPDLIGSEIARWLSTLEISGGSGGSGGGGSGGMVFTLEDFVGDWEQTAAYNLDQVLEQGGVSSLLQNLAVSVTPIQRIVRSGENALKIDIHVIIPYEGLSADQMAQIEEVFKVVYPVDDHHFKVILPYGTLVIDGVTPNMLNYFGRPYEGIAVFDGKKITVTGTLWNGNKIIDERLITPDGSMLFRVTINS

SEQ ID NO: 3527 - protein, 448 aa, Synthetic construct
MFHYVDVGPRDGTPVLFLHGNPTSSYVWRNIIPHVAPTHRCIAPDLIGMGKSSKPDIGYFFDDHVRFMDAFIEALGLEEVVLVIHDWGSALGFHWAKRNPERVKGIAFMEFIRPIPTWDEWPEFARETFQQFRTTDVGRKLIIDQNVFIEGTLPMGVVRPLTEVEMDHYREPFLNPQDREPLWRFPNELPIAGEPANIVALVEEYMDWLHQSPVPKLLFWGTPGVLIPPAEAARLAKSLPNCKAVDIGPGLNLLQEDNPDLIGSEIARWLSTLEISGGSGGSGGGGSGGMVFTLEDFVGDWEQTAAYNLDQVLEQGGVSSLLQNLAVSVTPIQRIVRSGENALKIDIHVIIPYEGLSADQMAQIEEVFKVVYPVDDHHFKVILPYGTLVIDGVTPNMLNYFGRPYEGIAVFDGKKITVTGTLWNGNKIIDERLITPDGSMLFRVTINS

SEQ ID NO: 3528 - protein, 448 aa, Synthetic construct
MFHYVDVGPRDGTPVLFLHGNPTSSYVWRNIIPHVAPTHRCIAPDLIGMGKSSKPDLGYFFDDHVRFMDAFIEALGLEEVVLVIHDWGAALGFHWAKRNPERVKGIAFMEFIRPIPTWDEWPEFARETFQQFRTTDVGRKLIIDQNVFIEGTLPMGVVRPLTEVEMDHYREPFLNPQDREPLWRFPNELPIAGEPANIVALVEEYMDWLHQSPVPKLLFWGTPGVLIPPAEAARLAKSLPNCKAVDIGPGLNLLQEDNPDLIGSEIARWLSTLEISGGSGGSGGGGSGGMVFTLEDFVGDWEQTAAYNLDQVLEQGGVSSLLQNLAVSVTPIQRIVRSGENALKIDIHVIIPYEGLSADQMAQIEEVFKVVYPVDDHHFKVILPYGTLVIDGVTPNMLNYFGRPYEGIAVFDGKKITVTGTLWNGNKIIDERLITPDGSMLFRVTINS

SEQ ID NO: 3529 - protein, 448 aa, Synthetic construct
MFHYVDVGPRDGTPVLFLHGNPTSSYVWRNIIPHVAPTHRCIAPDLIGMGKSSKPDLGYFFDDHVRFMDAFIEALGLEEVVLVIHDWGSALGFHWAKRNPERVKGIAFMEFIRPIPTWDEWPEFARETFQQFRTTDVGRKLIIDQNVFIEGTLPMGVVRPLTEVEMDHYREPFLNPQDREPLWRFPNELPIAGEPANIVALVEEYMDWLHQSPVPKLLFWGTPGVLIPPAEAARLAKSLPNCKAVDIGPGLNLLQEDNPDLIGSEIARWLSTLEISGGSGGSGGGGSGGMVFTLEDFVGDWEQTAAYNLDQVLEQGGVSSLLQNLAVSVTPIQRIVRSGENALKIDIHVIIPYEGLSADQMAQIEEVFKVVYPVDDHHFKVILPYGTLVIDGVTPNMLNYFGRPYEGIAVFDGKKITVTGTLWNGNKIIDERLITPDGSMLFRVTINS

SEQ ID NO: 3530 - protein, 448 aa, Synthetic construct
MFHYVDVGPRDGTPVLFLHGNPTSSYVWRNIIPHVAPTHRCIAPDLIGMGKSSKPDLGYFFDDHVRFMDAFIEALGLEEVVLVIHDWGSALGFHWAKRNPERVKGIAFMEFIRPIPTWDEWPEFARETFQQFRTTDVGRKLIIDQNVFIEGTLPMGVVRPLTEVEMDHYREPFLNPQDREPLWRFANELPIAGEPANIVALVEEYMDWLHQSPVPKLLFWGTPGVLIPPAEAARLAKSLPNCKAVDIGPGLNLLQEDNPDLIGSEIARWLSTLEISGGSGGSGGGGSGGMVFTLEDFVGDWEQTAAYNLDQVLEQGGVSSLLQNLAVSVTPIQRIVRSGENALKIDIHVIIPYEGLSADQMAQIEEVFKVVYPVDDHHFKVILPYGTLVIDGVTPNMLNYFGRPYEGIAVFDGKKITVTGTLWNGNKIIDERLITPDGSMLFRVTINS

SEQ ID NO: 3531 - protein, 448 aa, Synthetic construct
MFHYVDVGPRDGTPVLFLHGNPTSSYVWRNIIPHVAPTHRCIAPDLIGMGKSSKPDLGYFFDDHVRFMDAFIEALGLEEVVLVIHDWGSALGFHWAKRNPERVKGIAFMEFIRPIPTWDEWPEFARETFQQFRTTDVGRKLIIDQNVFIEGTLPMGVVRPLTEVEMDHYREPFLNPQDREPLWRFPNELPIAGEPANIVALVEEYMDWLHQSPVPKLLFWGTPGVLIPPAEAARLAKSLPNCKAVDIGPGLNILQEDNPDLIGSEIARWLSTLEISGGSGGSGGGGSGGMVFTLEDFVGDWEQTAAYNLDQVLEQGGVSSLLQNLAVSVTPIQRIVRSGENALKIDIHVIIPYEGLSADQMAQIEEVFKVVYPVDDHHFKVILPYGTLVIDGVTPNMLNYFGRPYEGIAVFDGKKITVTGTLWNGNKIIDERLITPDGSMLFRVTINS

SEQ ID NO: 3532 - protein, 448 aa, Synthetic construct
MFHYVDVGPRDGTPVLFLHGNPTSSYVWRNIIPHVAPTHRCIAPDLIGMGKSDKPDIGYFFDDHVRFMDAFIEALGLEEVVLVIHDWGAALGFHWAKRNPERVKGIAFMEFIRPIPTWDEWPEFARETFQQFRTTDVGRKLIIDQNVFIEGTLPMGVVRPLTEVEMDHYREPFLNPQDREPLWRFPNELPIAGEPANIVALVEEYMDWLHQSPVPKLLFWGTPGVLIPPAEAARLAKSLPNCKAVDIGPGLNLLQEDNPDLIGSEIARWLSTLEISGGSGGSGGGGSGGMVFTLEDFVGDWEQTAAYNLDQVLEQGGVSSLLQNLAVSVTPIQRIVRSGENALKIDIHVIIPYEGLSADQMAQIEEVFKVVYPVDDHHFKVILPYGTLVIDGVTPNMLNYFGRPYEGIAVFDGKKITVTGTLWNGNKIIDERLITPDGSMLFRVTINS

SEQ ID NO: 3533 - protein, 448 aa, Synthetic construct
MFHYVDVGPRDGTPVLFLHGNPTSSYVWRNIIPHVAPTHRCIAPDLIGMGKSDKPDIGYFFDDHVRFMDAFIEALGLEEVVLVIHDWGSALGFHWAKRNPERVKGIAFMEFIRPIPTWDEWPEFARETFQQFRTTDVGRKLIIDQNVFIEGTLPMGVVRPLTEVEMDHYREPFLNPQDREPLWRFPNELPIAGEPANIVALVEEYMDWLHQSPVPKLLFWGTPGVLIPPAEAARLAKSLPNCKAVDIGPGLNLLQEDNPDLIGSEIARWLSTLEISGGSGGSGGGGSGGMVFTLEDFVGDWEQTAAYNLDQVLEQGGVSSLLQNLAVSVTPIQRIVRSGENALKIDIHVIIPYEGLSADQMAQIEEVFKVVYPVDDHHFKVILPYGTLVIDGVTPNMLNYFGRPYEGIAVFDGKKITVTGTLWNGNKIIDERLITPDGSMLFRVTINS

SEQ ID NO: 3534 - protein, 448 aa, Synthetic construct
MFHYVDVGPRDGTPVLFLHGNPTSSYVWRNIIPHVAPTHRCIAPDLIGMGKSDKPDIGYFFDDHVRFMDAFIEALGLEEVVLVIHDWGSALGFHWAKRNPERVKGIAFMEFIRPIPTWDEWPEFARETFQQFRTEDVGRKLIIDQNVFIEGTLPMGVVRPLTEVEMDHYREPFLNPQDREPLWRFPNELPIAGEPANIVALVEEYMDWLHQSPVPKLLFWGTPGVLIPPAEAARLAKSLPNCKAVDIGPGLNLLQEDNPDLIGSEIARWLSTLEISGGSGGSGGGGSGGMVFTLEDFVGDWEQTAAYNLDQVLEQGGVSSLLQNLAVSVTPIQRIVRSGENALKIDIHVIIPYEGLSADQMAQIEEVFKVVYPVDDHHFKVILPYGTLVIDGVTPNMLNYFGRPYEGIAVFDGKKITVTGTLWNGNKIIDERLITPDGSMLFRVTINS

SEQ ID NO: 3535 - protein, 448 aa, Synthetic construct
MFHYVDVGPRDGTPVLFLHGNPTSSYVWRNIIPHVAPTHRCIAPDLIGMGKSDKPDIGYFFDDHVRFMDAFIEALGLEEVVLVIHDWGSALGFHWAKRNPERVKGIAFMEFIRPIPTWDEWPEFARETFQQFRTTDVGRKLIIDQNVFIEGTLPMGVVRPLTEVEMDHYREPFLNPQDREPLWRFPNELPIAGEPANIVALVEEYMDWLHQSPVPKLLFWGTPGVLIPPAEAARLAKALPNCKAVDIGPGLNLLQEDNPDLIGSEIARWLSTLEISGGSGGSGGGGSGGMVFTLEDFVGDWEQTAAYNLDQVLEQGGVSSLLQNLAVSVTPIQRIVRSGENALKIDIHVIIPYEGLSADQMAQIEEVFKVVYPVDDHHFKVILPYGTLVIDGVTPNMLNYFGRPYEGIAVFDGKKITVTGTLWNGNKIIDERLITPDGSMLFRVTINS

SEQ ID NO: 3536 - protein, 448 aa, Synthetic construct
MFHYVDVGPRDGTPVLFLHGNPTSSYVWRNIIPHVAPTHRCIAPDLIGMGKSDKPDLGYFFDDHVRFMDAFIEALGLEEVVLVIHDWGAALGFHWAKRNPERVKGIAFMEFIRPIPTWDEWPEFARETFQQFRTEDVGRKLIIDQNVFIEGTLPMGVVRPLTEVEMDHYREPFLNPQDREPLWRFPNELPIAGEPANIVALVEEYMDWLHQSPVPKLLFWGTPGVLIPPAEAARLAKSLPNCKAVDIGPGLNLLQEDNPDLIGSEIARWLSTLEISGGSGGSGGGGSGGMVFTLEDFVGDWEQTAAYNLDQVLEQGGVSSLLQNLAVSVTPIQRIVRSGENALKIDIHVIIPYEGLSADQMAQIEEVFKVVYPVDDHHFKVILPYGTLVIDGVTPNMLNYFGRPYEGIAVFDGKKITVTGTLWNGNKIIDERLITPDGSMLFRVTINS

SEQ ID NO: 3537 - protein, 448 aa, Synthetic construct
MFHYVDVGPRDGTPVLFLHGNPTSSYVWRNIIPHVAPTHRCIAPDLIGMGKSDKPDLGYFFDDHVRFMDAFIEALGLEEVVLVIHDWGAALGFHWAKRNPERVKGIAFMEFIRPIPTWDEWPEFARETFQQFRTTDVGRKLIIDQNVFIEGTLPMGVVRPLTEVEMDHYREPFLNPQDREPLWRFPNELPIAGEPANIVALVEEYMDWLHQSPVPKLLFWGTPGVLIPPAEAARLAKSLPNCKAVDIGPGLNLLQEDNPDLIGSEIARWLSTLEISGGSGGSGGGGSGGMVFTLEDFVGDWEQTAAYNLDQVLEQGGVSSLLQNLAVSVTPIQRIVRSGENALKIDIHVIIPYEGLSADQMAQIEEVFKVVYPVDDHHFKVILPYGTLVIDGVTPNMLNYFGRPYEGIAVFDGKKITVTGTLWNGNKIIDERLITPDGSMLFRVTINS

SEQ ID NO: 3538 - protein, 448 aa, Synthetic construct
MFHYVDVGPRDGTPVLFLHGNPTSSYVWRNIIPHVAPTHRCIAPDLIGMGKSDKPDLGYFFDDHVRFMDAFIEALGLEEVVLVIHDWGSALGLHWAKRNPERVKGIAFMEFIRPIPTWDEWPEFARETFQQFRTTDVGRKLIIDQNVMIEGTLPMGVVRPLTEVEMDHYREPFLNPQDREPLWRFPNELPIAGEPANIVALVEEYMDWLHQSPVPKLLFWGTPGVLIPPAEAARLAKSLPNCKAVDIGPGLNLLQEDNPDLIGSEIARWLSTLEISGGSGGSGGGGSGGMVFTLEDFVGDWEQTAAYNLDQVLEQGGVSSLLQNLAVSVTPIQRIVRSGENALKIDIHVIIPYEGLSADQMAQIEEVFKVVYPVDDHHFKVILPYGTLVIDGVTPNMLNYFGRPYEGIAVFDGKKITVTGTLWNGNKIIDERLITPDGSMLFRVTINS

SEQ ID NO: 3539 - protein, 448 aa, Synthetic construct
MFHYVDVGPRDGTPVLFLHGNPTSSYVWRNIIPHVAPTHRCIAPDLIGMGKSDKPDLGYFFDDHVRFMDAFIEALGLEEVVLVIHDWGSALGLHWAKRNPERVKGIAFMEFIRPIPTWDEWPEFARETFQQFRTTDVGRKLIIDQNVFIEGTLPMGVVRPLTEVEMDHYREPFLNPQDREPLWRFANELPIAGEPANIVALVEEYMDWLHQSPVPKLLFWGTPGVLIPPAEAARLAKSLPNCKAVDIGPGLNLLQEDNPDLIGSEIARWLSTLEISGGSGGSGGGGSGGMVFTLEDFVGDWEQTAAYNLDQVLEQGGVSSLLQNLAVSVTPIQRIVRSGENALKIDIHVIIPYEGLSADQMAQIEEVFKVVYPVDDHHFKVILPYGTLVIDGVTPNMLNYFGRPYEGIAVFDGKKITVTGTLWNGNKIIDERLITPDGSMLFRVTINS

SEQ ID NO: 3540 - protein, 448 aa, Synthetic construct
MFHYVDVGPRDGTPVLFLHGNPTSSYVWRNIIPHVAPTHRCIAPDLIGMGKSDKPDLGYFFDDHVRFMDAFIEALGLEEVVLVIHDWGSALGFHWAKRNPERVKGIAFMEFIRPIPTWDEWPEFARETFQQFRTEDVGRKLIIDQNVFIEGTLPMGVVRPLTEVEMDHYREPFLNPQDREPLWRFPNELPIAGEPANIVALVEEYMDWLHQSPVPKLLFWGTPGVLIPPAEAARLAKSLPNCKAVDIGPGLNILQEDNPDLIGSEIARWLSTLEISGGSGGSGGGGSGGMVFTLEDFVGDWEQTAAYNLDQVLEQGGVSSLLQNLAVSVTPIQRIVRSGENALKIDIHVIIPYEGLSADQMAQIEEVFKVVYPVDDHHFKVILPYGTLVIDGVTPNMLNYFGRPYEGIAVFDGKKITVTGTLWNGNKIIDERLITPDGSMLFRVTINS

SEQ ID NO: 3541 - protein, 448 aa, Synthetic construct
MFHYVDVGPRDGTPVLFLHGNPTSSYVWRNIIPHVAPTHRCIAPDLIGMGKSDKPDLGYFFDDHVRFMDAFIEALGLEEVVLVIHDWGSALGFHWAKRNPERVKGIAFMEFIRPIPTWDEWPEFARETFQQFRTTDVGRKLIIDQNVMIEGTLPMGVVRPLTEVEMDHYREPFLNPQDREPLWRFPNELPIAGEPANIVALVEEYMDWLHQSPVPKLLFWGTPGVLIPPAEAARLAKSLPNCKAVDIGPGLNLLQEDNPDLIGSEIARWLSTLEISGGSGGSGGGGSGGMVFTLEDFVGDWEQTAAYNLDQVLEQGGVSSLLQNLAVSVTPIQRIVRSGENALKIDIHVIIPYEGLSADQMAQIEEVFKVVYPVDDHHFKVILPYGTLVIDGVTPNMLNYFGRPYEGIAVFDGKKITVTGTLWNGNKIIDERLITPDGSMLFRVTINS

SEQ ID NO: 3542 - protein, 448 aa, Synthetic construct
MFHYVDVGPRDGTPVLFLHGNPTSSYVWRNIIPHVAPTHRCIAPDLIGFGKSGKPDLGYFFDDHVRFMDAFIEALGLEEVVLVIHDWGSALGFHWAKRNPERVKGIAFMEFIRPIPTWDEWPEFARETFQAFRTTDVGRKLIIDQNVFIEGTLPMGVVRPLTEVEMDHYREPFLNPEDREPLWRFPNELPIAGEPANIVALVEEYMDWLHQSPVPKLLFWGTPGVLIPPAEAARLAKSLPNCKAVDIGPGLNILQEDNPDLIGSEIARWLSTLEISGGSGGSGGGGSGGMVFTLEDFVGDWEQTAAYNLDQVLEQGGVSSLLQNLAVSVTPIQRIVRSGENALKIDIHVIIPYEGLSADQMAQIEEVFKVVYPVDDHHFKVILPYGTLVIDGVTPNMLNYFGRPYEGIAVFDGKKITVTGTLWNGNKIIDERLITPDGSMLFRVTINS

SEQ ID NO: 3543 - protein, 448 aa, Synthetic construct
MFHYVDVGPRDGTPVLFLHGNPTSSYVWRNIIPHVAPTHRCIAPDLIGFGKSDKPDIGYFFDDHVRFMDAFIEALGLEEVVLVIHDWGSALGFHWAKRNPERVKGIAFMEFIRPIPTWDEWPEFARETFQAFRTTDVGRKLIIDQNVFIEGTLPMGVVRPLTEVEMDHYREPFLNPEDREPLWRFPNELPIAGEPANIVALVEEYMDWLHQSPVPKLLFWGTPGVLIPPAEAARLAKSLPNCKAVDIGPGLNILQEDNPDLIGSEIARWLSTLEISGGSGGSGGGGSGGMVFTLEDFVGDWEQTAAYNLDQVLEQGGVSSLLQNLAVSVTPIQRIVRSGENALKIDIHVIIPYEGLSADQMAQIEEVFKVVYPVDDHHFKVILPYGTLVIDGVTPNMLNYFGRPYEGIAVFDGKKITVTGTLWNGNKIIDERLITPDGSMLFRVTINS

SEQ ID NO: 3544 - protein, 448 aa, Synthetic construct
MFHYVDVGPRDGTPVLFLHGNPTSSYVWRNIIPHVAPTHRCIAPDLIGFGKSDKPDLGYFFDDHVRFMDAFIEALGLEEVVLVIHDWGAALGFHWAKRNPERVKGIAFMEFIRPIPTWDEWPEFARETFQAFRTTDVGRKLIIDQNVFIEGTLPMGVVRPLTEVEMDHYREPFLNPEDREPLWRFPNELPIAGEPANIVALVEEYMDWLHQSPVPKLLFWGTPGVLIPPAEAARLAKSLPNCKAVDIGPGLNILQEDNPDLIGSEIARWLSTLEISGGSGGSGGGGSGGMVFTLEDFVGDWEQTAAYNLDQVLEQGGVSSLLQNLAVSVTPIQRIVRSGENALKIDIHVIIPYEGLSADQMAQIEEVFKVVYPVDDHHFKVILPYGTLVIDGVTPNMLNYFGRPYEGIAVFDGKKITVTGTLWNGNKIIDERLITPDGSMLFRVTINS

SEQ ID NO: 3545 - protein, 448 aa, Synthetic construct
MFHYVDVGPRDGTPVLFLHGNPTSSYVWRNIIPHVAPTHRCIAPDLIGFGKSDKPDLGYFFDDHVRFMDAFIEALGLEEVVLVIHDWGSALGFHWAKRNPERVKGIAFMEFIRPIPTWDEWPEFARETFQAFRTTDVGRKLIIDQNVFIEGTLPMGVVRPLTEVEMDHYREPFLNPEDREPLWRFPNELPIAGEPANIVALVEEYMDWLHQSPVPKLLFWGTPGVLIPPAEAARLAKSLPNCKAVDIGPGLNILQEDNPDLIGSEIARWLSTLEISGGSGGSGGGGSGGMVFTLEDFVGDWEQTAAYNLDQVLEQGGVSSLLQNLAVSVTPIQRIVRSGENALKIDIHVIIPYEGLSADQMAQIEEVFKVVYPVDDHHFKVILPYGTLVIDGVTPNMLNYFGRPYEGIAVFDGKKITVTGTLWNGNKIIDERLITPDGSMLFRVTINS

SEQ ID NO: 3546 - protein, 448 aa, Synthetic construct
MFHYVDVGPRDGTPVLFLHGNPTSSYVWRNIIPHVAPTHRCIAPDLIGMGKSGKPDIGYFFDDHVRFMDAFIEALGLEEVVLVIHDWGSALGFHWAKRNPERVKGIAFMEFIRPIPTWDEWPEFARETFQAFRTTDVGRKLIIDQNVFIEGTLPMGVVRPLTEVEMDHYREPFLNPEDREPLWRFPNELPIAGEPANIVALVEEYMDWLHQSPVPKLLFWGTPGVLIPPAEAARLAKSLPNCKAVDIGPGLNILQEDNPDLIGSEIARWLSTLEISGGSGGSGGGGSGGMVFTLEDFVGDWEQTAAYNLDQVLEQGGVSSLLQNLAVSVTPIQRIVRSGENALKIDIHVIIPYEGLSADQMAQIEEVFKVVYPVDDHHFKVILPYGTLVIDGVTPNMLNYFGRPYEGIAVFDGKKITVTGTLWNGNKIIDERLITPDGSMLFRVTINS

SEQ ID NO: 3547 - protein, 448 aa, Synthetic construct
MFHYVDVGPRDGTPVLFLHGNPTSSYVWRNIIPHVAPTHRCIAPDLIGMGKSGKPDLGYFFDDHVRFMDAFIEALGLEEVVLVIHDWGSALGFHWAKRNPERVKGIAFMEFIRPIPTWDEWPEFAREMFQAFRTTDVGRKLIIDQNVFIEGTLPMGVVRPLTEVEMDHYREPFLNPEDREPLWRFPNELPIAGEPANIVALVEEYMDWLHQSPVPKLLFWGTPGVLIPPAEAARLAKSLPNCKAVDIGPGLNILQEDNPDLIGSEIARWLSTLEISGGSGGSGGGGSGGMVFTLEDFVGDWEQTAAYNLDQVLEQGGVSSLLQNLAVSVTPIQRIVRSGENALKIDIHVIIPYEGLSADQMAQIEEVFKVVYPVDDHHFKVILPYGTLVIDGVTPNMLNYFGRPYEGIAVFDGKKITVTGTLWNGNKIIDERLITPDGSMLFRVTINS

SEQ ID NO: 3548 - protein, 448 aa, Synthetic construct
MFHYVDVGPRDGTPVLFLHGNPTSSYVWRNIIPHVAPTHRCIAPDLIGMGKSGKPDLGYFFDDHVRFMDAFIEALGLEEVVLVIHDWGSALGFHWAKRNPERVKGIAFMEFIRPIPTWDEWPEFARETFQAFRTTDVGRKLIIDQNVMIEGTLPMGVVRPLTEVEMDHYREPFLNPEDREPLWRFPNELPIAGEPANIVALVEEYMDWLHQSPVPKLLFWGTPGVLIPPAEAARLAKSLPNCKAVDIGPGLNILQEDNPDLIGSEIARWLSTLEISGGSGGSGGGGSGGMVFTLEDFVGDWEQTAAYNLDQVLEQGGVSSLLQNLAVSVTPIQRIVRSGENALKIDIHVIIPYEGLSADQMAQIEEVFKVVYPVDDHHFKVILPYGTLVIDGVTPNMLNYFGRPYEGIAVFDGKKITVTGTLWNGNKIIDERLITPDGSMLFRVTINS

SEQ ID NO: 3549 - protein, 448 aa, Synthetic construct
MFHYVDVGPRDGTPVLFLHGNPTSSYVWRNIIPHVAPTHRCIAPDLIGMGKSGKPDLGYFFDDHVRFMDAFIEALGLEEVVLVIHDWGSALGFHWAKRNPERVKGIAFMEFIRPIPTWDEWPEFARETFQAFRTTDVGRKLIIDQNVFIEGTLPMGVVRPLTEVEMDHYREPFLNPEDREPLWRFANELPIAGEPANIVALVEEYMDWLHQSPVPKLLFWGTPGVLIPPAEAARLAKSLPNCKAVDIGPGLNILQEDNPDLIGSEIARWLSTLEISGGSGGSGGGGSGGMVFTLEDFVGDWEQTAAYNLDQVLEQGGVSSLLQNLAVSVTPIQRIVRSGENALKIDIHVIIPYEGLSADQMAQIEEVFKVVYPVDDHHFKVILPYGTLVIDGVTPNMLNYFGRPYEGIAVFDGKKITVTGTLWNGNKIIDERLITPDGSMLFRVTINS

SEQ ID NO: 3550 - protein, 448 aa, Synthetic construct
MFHYVDVGPRDGTPVLFLHGNPTSSYVWRNIIPHVAPTHRCIAPDLIGMGKSSKPPLGYFFDDHVRFMDAFIEALGLEEVVLVIHDWGSALGFHWAKRNPERVKGIAFMEFIRPIPTWDEWPEFARETFQAFRTTDVGRKLIIDQNVFIEGTLPMGVVRPLTEVEMDHYREPFLNPEDREPLWRFPNELPIAGEPANIVALVEEYMDWLHQSPVPKLLFWGTPGVLIPPAEAARLAKSLPNCKAVDIGPGLNILQEDNPDLIGSEIARWLSTLEISGGSGGSGGGGSGGMVFTLEDFVGDWEQTAAYNLDQVLEQGGVSSLLQNLAVSVTPIQRIVRSGENALKIDIHVIIPYEGLSADQMAQIEEVFKVVYPVDDHHFKVILPYGTLVIDGVTPNMLNYFGRPYEGIAVFDGKKITVTGTLWNGNKIIDERLITPDGSMLFRVTINS

SEQ ID NO: 3551 - protein, 448 aa, Synthetic construct
MFHYVDVGPRDGTPVLFLHGNPTSSYVWRNIIPHVAPTHRCIAPDLIGMGKSSKPDLGYFFDDHVRFMDAFIEALGLEEVVLVIHDWGSALGFHWAKRNPERVKGIAFMEFIRPIPTWDEWPEFARETFQAFRTTDVGRKLIIDQNVFIEGTLPMGVVRPLTEVEMDHYREPFLNPEDREPLWRFANELPIAGEPANIVALVEEYMDWLHQSPVPKLLFWGTPGVLIPPAEAARLAKSLPNCKAVDIGPGLNILQEDNPDLIGSEIARWLSTLEISGGSGGSGGGGSGGMVFTLEDFVGDWEQTAAYNLDQVLEQGGVSSLLQNLAVSVTPIQRIVRSGENALKIDIHVIIPYEGLSADQMAQIEEVFKVVYPVDDHHFKVILPYGTLVIDGVTPNMLNYFGRPYEGIAVFDGKKITVTGTLWNGNKIIDERLITPDGSMLFRVTINS

SEQ ID NO: 3552 - protein, 448 aa, Synthetic construct
MFHYVDVGPRDGTPVLFLHGNPTSSYVWRNIIPHVAPTHRCIAPDLIGMGKSDKPDIGYFFDDHVRFMDAFIEALGLEEVVLVIHDWGAALGFHWAKRNPERVKGIAFMEFIRPIPTWDEWPEFARETFQAFRTTDVGRKLIIDQNVFIEGTLPMGVVRPLTEVEMDHYREPFLNPEDREPLWRFPNELPIAGEPANIVALVEEYMDWLHQSPVPKLLFWGTPGVLIPPAEAARLAKSLPNCKAVDIGPGLNILQEDNPDLIGSEIARWLSTLEISGGSGGSGGGGSGGMVFTLEDFVGDWEQTAAYNLDQVLEQGGVSSLLQNLAVSVTPIQRIVRSGENALKIDIHVIIPYEGLSADQMAQIEEVFKVVYPVDDHHFKVILPYGTLVIDGVTPNMLNYFGRPYEGIAVFDGKKITVTGTLWNGNKIIDERLITPDGSMLFRVTINS

SEQ ID NO: 3553 - protein, 448 aa, Synthetic construct
MFHYVDVGPRDGTPVLFLHGNPTSSYVWRNIIPHVAPTHRCIAPDLIGMGKSDKPDIGYFFDDHVRFMDAFIEALGLEEVVLVIHDWGSALGFHWAKRNPERVKGIAFMEFIRPIPTWDEWPEFARETFQAFRTTDVGRKLIIDQNVFIEGTLPMGVVRPLTEVEMDHYREPFLNPEDREPLWRFPNELPIAGEPANIVALVEEYMDWLHQSPVPKLLFWGTPGVLIPPAEAARLAKALPNCKAVDIGPGLNILQEDNPDLIGSEIARWLSTLEISGGSGGSGGGGSGGMVFTLEDFVGDWEQTAAYNLDQVLEQGGVSSLLQNLAVSVTPIQRIVRSGENALKIDIHVIIPYEGLSADQMAQIEEVFKVVYPVDDHHFKVILPYGTLVIDGVTPNMLNYFGRPYEGIAVFDGKKITVTGTLWNGNKIIDERLITPDGSMLFRVTINS

SEQ ID NO: 3554 - protein, 448 aa, Synthetic construct
MFHYVDVGPRDGTPVLFLHGNPTSSYVWRNIIPHVAPTHRCIAPDLIGMGKSDKPDLGYFFDDHVRFMDAFIEALGLEEVVLVIHDWGSALGLHWAKRNPERVKGIAFMEFIRPIPTWDEWPEFARETFQAFRTTDVGRKLIIDQNVMIEGTLPMGVVRPLTEVEMDHYREPFLNPEDREPLWRFPNELPIAGEPANIVALVEEYMDWLHQSPVPKLLFWGTPGVLIPPAEAARLAKSLPNCKAVDIGPGLNILQEDNPDLIGSEIARWLSTLEISGGSGGSGGGGSGGMVFTLEDFVGDWEQTAAYNLDQVLEQGGVSSLLQNLAVSVTPIQRIVRSGENALKIDIHVIIPYEGLSADQMAQIEEVFKVVYPVDDHHFKVILPYGTLVIDGVTPNMLNYFGRPYEGIAVFDGKKITVTGTLWNGNKIIDERLITPDGSMLFRVTINS

SEQ ID NO: 3555 - protein, 448 aa, Synthetic construct
MFHYVDVGPRDGTPVLFLHGNPTSSYVWRNIIPHVAPTHRCIAPDLIGMGKSDKPDLGYFFDDHVRFMDAFIEALGLEEVVLVIHDWGSALGLHWAKRNPERVKGIAFMEFIRPIPTWDEWPEFARETFQAFRTTDVGRKLIIDQNVFIEGTLPMGVVRPLTEVEMDHYREPFLNPEDREPLWRFANELPIAGEPANIVALVEEYMDWLHQSPVPKLLFWGTPGVLIPPAEAARLAKSLPNCKAVDIGPGLNILQEDNPDLIGSEIARWLSTLEISGGSGGSGGGGSGGMVFTLEDFVGDWEQTAAYNLDQVLEQGGVSSLLQNLAVSVTPIQRIVRSGENALKIDIHVIIPYEGLSADQMAQIEEVFKVVYPVDDHHFKVILPYGTLVIDGVTPNMLNYFGRPYEGIAVFDGKKITVTGTLWNGNKIIDERLITPDGSMLFRVTINS

SEQ ID NO: 3556 - protein, 448 aa, Synthetic construct
MFHYVDVGPRDGTPVLFLHGNPTSSYVWRNIIPHVAPTHRCIAPDLIGMGKSDKPDLGYFFDDHVRFMDAFIEALGLEEVVLVIHDWGSALGFHWAKRNPERVKGIAFMEFIRPIPTWDEWPEFARETFQQFRTTDVGRKLIIDQNVMIEGTLPMGVVRPLTEVEMDHYREPFLNPEDREPLWRFPNELPIAGEPANIVALVEEYMDWLHQSPVPKLLFWGTPGVLIPPAEAARLAKSLPNCKAVDIGPGLNILQEDNPDLIGSEIARWLSTLEISGGSGGSGGGGSGGMVFTLEDFVGDWEQTAAYNLDQVLEQGGVSSLLQNLAVSVTPIQRIVRSGENALKIDIHVIIPYEGLSADQMAQIEEVFKVVYPVDDHHFKVILPYGTLVIDGVTPNMLNYFGRPYEGIAVFDGKKITVTGTLWNGNKIIDERLITPDGSMLFRVTINS

SEQ ID NO: 3557 - protein, 448 aa, Synthetic construct
MFHYVDVGPRDGTPVLFLHGNPTSSYVWRNIIPHVAPTHRCIAPDLIGMGKSDKPDLGYFFDDHVRFMDAFIEALGLEEVVLVIHDWGSALGFHWAKRNPERVKGIAFMEFIRPIPTWDEWPEFARETFQQFRTTDVGRKLIIDQNVFIEGTLPMGVVRPLTEVEMDHYREPFLNPEDREPLWRFPNELPIAGEPANIVALVEEYMDWLHQSPVPKLLFWGTPGVLIPPAEAARLAKSLPNCKAVDIGPGLNILQEDNPDLIGSEIARWLSTLEISGGSGGSGGGGSGGMVFTLEDFVGDWEQTAAYNLDQVLEQGGVSSLLQNLAVSVTPIQRIVRSGENALKIDIHVIIPYEGLSADQMAQIEEVFKVVYPVDDHHFKVILPYGTLVIDGVTPNMLNYFGRPYEGIAVFDGKKITVTGTLWNGNKIIDERLITPDGSMLFRVTINS

SEQ ID NO: 3558 - protein, 457 aa, Synthetic construct
MFHYVDVGPRDGTPVLFLHGNPTSSYVWRNIIPHVAPTHRCIAPDLIGMGKSDKPDLGYFFDDHVRFMDAFIEALGLEEVVLVIHDWGSALGFHWAKRNPERVKGIAFMEFVRPIPTWDEWPEFARETFQAFRTTDVGRKLIIDQNVFIEGTLPMGVVRPLTEVEMDHYREPFLNPVDREPLWRFPNELPIAGEPANIVALVEEYMDWLHQSPVPKLLFWGTPGVLIPPAEAARLAKSLPNCKAVDIGPGLNLLQEDNPDLIGSEIARWLSTLEISGGSGGSGGGGSGGMVFTLEDFVGDWEQTAAYNLDQVLEQGGVSSLLQNLAVSVTPIQRIVRSGENALKIDIHVIIPYEGLSADQMAQIEEVFKVVYPVDDHHFKVILPYGTLVIDGVTPNMLNYFGRPYEGIAVFDGKKITVTGTLWNGNKIIDERLITPDGSMLFRVTINSGSGHHHHHH

SEQ ID NO: 3559 - protein, 457 aa, Synthetic construct
MFHYVDVGPRDGTPVLFLHGNPTSSYVWRNIIPHVAPTHRCIAPDLIGMGKSDKPDLGYFFDDHVRFMDAFIEALGLEEVVLVIHDWGSALGFHWAKRNPERVKGIAFMEFIRTIPTWDEWPEFARETFQAFRTTDVGRKLIIDQNVFIEGTLPMGVVRPLTEVEMDHYREPFLNPVDREPLWRFPNELPIAGEPANIVALVEEYMDWLHQSPVPKLLFWGTPGVLIPPAEAARLAKSLPNCKAVDIGPGLNLLQEDNPDLIGSEIARWLSTLEISGGSGGSGGGGSGGMVFTLEDFVGDWEQTAAYNLDQVLEQGGVSSLLQNLAVSVTPIQRIVRSGENALKIDIHVIIPYEGLSADQMAQIEEVFKVVYPVDDHHFKVILPYGTLVIDGVTPNMLNYFGRPYEGIAVFDGKKITVTGTLWNGNKIIDERLITPDGSMLFRVTINSGSGHHHHHH

SEQ ID NO: 3560 - protein, 457 aa, Synthetic construct
MFHYVDVGPRDGTPVLFLHGNPTSSYVWRNIIPHVAPTHRCIAPDLIGMGKSDKPDLGYFFDDHVRFMDAFIEALGLEEVVLVIHDWGSALGFHWAKRNPERVKGIAFMEFIRPVPTWDEWPEFARETFQAFRTTDVGRKLIIDQNVFIEGTLPMGVVRPLTEVEMDHYREPFLNPVDREPLWRFPNELPIAGEPANIVALVEEYMDWLHQSPVPKLLFWGTPGVLIPPAEAARLAKSLPNCKAVDIGPGLNLLQEDNPDLIGSEIARWLSTLEISGGSGGSGGGGSGGMVFTLEDFVGDWEQTAAYNLDQVLEQGGVSSLLQNLAVSVTPIQRIVRSGENALKIDIHVIIPYEGLSADQMAQIEEVFKVVYPVDDHHFKVILPYGTLVIDGVTPNMLNYFGRPYEGIAVFDGKKITVTGTLWNGNKIIDERLITPDGSMLFRVTINSGSGHHHHHH

SEQ ID NO: 3561 - protein, 457 aa, Synthetic construct
MFHYVDVGPRDGTPVLFLHGNPTSSYVWRNIIPHVAPTHRCIAPDLIGMGKSDKPDLGYFFDDHVRFMDAFIEALGLEEVVLVIHDWGSALGFHWAKRNPERVKGIAFMEFIRPIGTWDEWPEFARETFQAFRTTDVGRKLIIDQNVFIEGTLPMGVVRPLTEVEMDHYREPFLNPVDREPLWRFPNELPIAGEPANIVALVEEYMDWLHQSPVPKLLFWGTPGVLIPPAEAARLAKSLPNCKAVDIGPGLNLLQEDNPDLIGSEIARWLSTLEISGGSGGSGGGGSGGMVFTLEDFVGDWEQTAAYNLDQVLEQGGVSSLLQNLAVSVTPIQRIVRSGENALKIDIHVIIPYEGLSADQMAQIEEVFKVVYPVDDHHFKVILPYGTLVIDGVTPNMLNYFGRPYEGIAVFDGKKITVTGTLWNGNKIIDERLITPDGSMLFRVTINSGSGHHHHHH

SEQ ID NO: 3562 - protein, 457 aa, Synthetic construct
MFHYVDVGPRDGTPVLFLHGNPTSSYVWRNIIPHVAPTHRCIAPDLIGMGKSDKPDLGYFFDDHVRFMDAFIEALGLEEVVLVIHDWGSALGFHWAKRNPERVKGIAFMEFIRPIPDWDEWPEFARETFQAFRTTDVGRKLIIDQNVFIEGTLPMGVVRPLTEVEMDHYREPFLNPVDREPLWRFPNELPIAGEPANIVALVEEYMDWLHQSPVPKLLFWGTPGVLIPPAEAARLAKSLPNCKAVDIGPGLNLLQEDNPDLIGSEIARWLSTLEISGGSGGSGGGGSGGMVFTLEDFVGDWEQTAAYNLDQVLEQGGVSSLLQNLAVSVTPIQRIVRSGENALKIDIHVIIPYEGLSADQMAQIEEVFKVVYPVDDHHFKVILPYGTLVIDGVTPNMLNYFGRPYEGIAVFDGKKITVTGTLWNGNKIIDERLITPDGSMLFRVTINSGSGHHHHHH

SEQ ID NO: 3563 - protein, 457 aa, Synthetic construct
MFHYVDVGPRDGTPVLFLHGNPTSSYVWRNIIPHVAPTHRCIAPDLIGMGKSDKPDLGYFFDDHVRFMDAFIEALGLEEVVLVIHDWGSALGFHWAKRNPERVKGIAFMEFIRPIPTWDEWPEFARKTFQAFRTTDVGRKLIIDQNVFIEGTLPMGVVRPLTEVEMDHYREPFLNPVDREPLWRFPNELPIAGEPANIVALVEEYMDWLHQSPVPKLLFWGTPGVLIPPAEAARLAKSLPNCKAVDIGPGLNLLQEDNPDLIGSEIARWLSTLEISGGSGGSGGGGSGGMVFTLEDFVGDWEQTAAYNLDQVLEQGGVSSLLQNLAVSVTPIQRIVRSGENALKIDIHVIIPYEGLSADQMAQIEEVFKVVYPVDDHHFKVILPYGTLVIDGVTPNMLNYFGRPYEGIAVFDGKKITVTGTLWNGNKIIDERLITPDGSMLFRVTINSGSGHHHHHH

SEQ ID NO: 3564 - protein, 457 aa, Synthetic construct
MFHYVDVGPRDGTPVLFLHGNPTSSYVWRNIIPHVAPTHRCIAPDLIGMGKSDKPDLGYFFDDHVRFMDAFIEALGLEEVVLVIHDWGSALGFHWAKRNPERVKGIAFMEFIRPIPTWDEWPEFARETFRAFRTTDVGRKLIIDQNVFIEGTLPMGVVRPLTEVEMDHYREPFLNPVDREPLWRFPNELPIAGEPANIVALVEEYMDWLHQSPVPKLLFWGTPGVLIPPAEAARLAKSLPNCKAVDIGPGLNLLQEDNPDLIGSEIARWLSTLEISGGSGGSGGGGSGGMVFTLEDFVGDWEQTAAYNLDQVLEQGGVSSLLQNLAVSVTPIQRIVRSGENALKIDIHVIIPYEGLSADQMAQIEEVFKVVYPVDDHHFKVILPYGTLVIDGVTPNMLNYFGRPYEGIAVFDGKKITVTGTLWNGNKIIDERLITPDGSMLFRVTINSGSGHHHHHH

SEQ ID NO: 3565 - protein, 457 aa, Synthetic construct
MFHYVDVGPRDGTPVLFLHGNPTSSYVWRNIIPHVAPTHRCIAPDLIGMGKSDKPDLGYFFDDHVRFMDAFIEALGLEEVVLVIHDWGSALGFHWAKRNPERVKGIAFMEFIRPIPTWDEWPEFARETFQRFRTTDVGRKLIIDQNVFIEGTLPMGVVRPLTEVEMDHYREPFLNPVDREPLWRFPNELPIAGEPANIVALVEEYMDWLHQSPVPKLLFWGTPGVLIPPAEAARLAKSLPNCKAVDIGPGLNLLQEDNPDLIGSEIARWLSTLEISGGSGGSGGGGSGGMVFTLEDFVGDWEQTAAYNLDQVLEQGGVSSLLQNLAVSVTPIQRIVRSGENALKIDIHVIIPYEGLSADQMAQIEEVFKVVYPVDDHHFKVILPYGTLVIDGVTPNMLNYFGRPYEGIAVFDGKKITVTGTLWNGNKIIDERLITPDGSMLFRVTINSGSGHHHHHH

SEQ ID NO: 3566 - protein, 457 aa, Synthetic construct
MFHYVDVGPRDGTPVLFLHGNPTSSYVWRNIIPHVAPTHRCIAPDLIGMGKSDKPDLGYFFDDHVRFMDAFIEALGLEEVVLVIHDWGSALGFHWAKRNPERVKGIAFMEFIRPIPTWDEWPEFARETFQAFRTTDVGRELIIDQNVFIEGTLPMGVVRPLTEVEMDHYREPFLNPVDREPLWRFPNELPIAGEPANIVALVEEYMDWLHQSPVPKLLFWGTPGVLIPPAEAARLAKSLPNCKAVDIGPGLNLLQEDNPDLIGSEIARWLSTLEISGGSGGSGGGGSGGMVFTLEDFVGDWEQTAAYNLDQVLEQGGVSSLLQNLAVSVTPIQRIVRSGENALKIDIHVIIPYEGLSADQMAQIEEVFKVVYPVDDHHFKVILPYGTLVIDGVTPNMLNYFGRPYEGIAVFDGKKITVTGTLWNGNKIIDERLITPDGSMLFRVTINSGSGHHHHHH

SEQ ID NO: 3567 - protein, 457 aa, Synthetic construct
MFHYVDVGPRDGTPVLFLHGNPTSSYVWRNIIPHVAPTHRCIAPDLIGMGKSDKPDLGYFFDDHVRFMDAFIEALGLEEVVLVIHDWGSALGFHWAKRNPERVKGIAFMEFIRPIPTWDEWPEFARETFQAFRTTDVGRKLIIDQNVIIEGTLPMGVVRPLTEVEMDHYREPFLNPVDREPLWRFPNELPIAGEPANIVALVEEYMDWLHQSPVPKLLFWGTPGVLIPPAEAARLAKSLPNCKAVDIGPGLNLLQEDNPDLIGSEIARWLSTLEISGGSGGSGGGGSGGMVFTLEDFVGDWEQTAAYNLDQVLEQGGVSSLLQNLAVSVTPIQRIVRSGENALKIDIHVIIPYEGLSADQMAQIEEVFKVVYPVDDHHFKVILPYGTLVIDGVTPNMLNYFGRPYEGIAVFDGKKITVTGTLWNGNKIIDERLITPDGSMLFRVTINSGSGHHHHHH

SEQ ID NO: 3568 - protein, 457 aa, Synthetic construct
MFHYVDVGPRDGTPVLFLHGNPTSSYVWRNIIPHVAPTHRCIAPDLIGMGKSDKPDLGYFFDDHVRFMDAFIEALGLEEVVLVIHDWGSALGFHWAKRNPERVKGIAFMEFIRPIPTWDEWPEFARETFQAFRTTDVGRKLIIDQNVLIEGTLPMGVVRPLTEVEMDHYREPFLNPVDREPLWRFPNELPIAGEPANIVALVEEYMDWLHQSPVPKLLFWGTPGVLIPPAEAARLAKSLPNCKAVDIGPGLNLLQEDNPDLIGSEIARWLSTLEISGGSGGSGGGGSGGMVFTLEDFVGDWEQTAAYNLDQVLEQGGVSSLLQNLAVSVTPIQRIVRSGENALKIDIHVIIPYEGLSADQMAQIEEVFKVVYPVDDHHFKVILPYGTLVIDGVTPNMLNYFGRPYEGIAVFDGKKITVTGTLWNGNKIIDERLITPDGSMLFRVTINSGSGHHHHHH

SEQ ID NO: 3569 - protein, 457 aa, Synthetic construct
MFHYVDVGPRDGTPVLFLHGNPTSSYVWRNIIPHVAPTHRCIAPDLIGMGKSDKPDLGYFFDDHVRFMDAFIEALGLEEVVLVIHDWGSALGFHWAKRNPERVKGIAFMEFIRPIPTWDEWPEFARETFQAFRTTDVGRKLIIDQNVFIEGTLRMGVVRPLTEVEMDHYREPFLNPVDREPLWRFPNELPIAGEPANIVALVEEYMDWLHQSPVPKLLFWGTPGVLIPPAEAARLAKSLPNCKAVDIGPGLNLLQEDNPDLIGSEIARWLSTLEISGGSGGSGGGGSGGMVFTLEDFVGDWEQTAAYNLDQVLEQGGVSSLLQNLAVSVTPIQRIVRSGENALKIDIHVIIPYEGLSADQMAQIEEVFKVVYPVDDHHFKVILPYGTLVIDGVTPNMLNYFGRPYEGIAVFDGKKITVTGTLWNGNKIIDERLITPDGSMLFRVTINSGSGHHHHHH

SEQ ID NO: 3570 - protein, 457 aa, Synthetic construct
MFHYVDVGPRDGTPVLFLHGNPTSSYVWRNIIPHVAPTHRCIAPDLIGMGKSDKPDLGYFFDDHVRFMDAFIEALGLEEVVLVIHDWGSALGFHWAKRNPERVKGIAFMEFIRPIPTWDEWPEFARETFQAFRTTDVGRKLIIDQNVFIEGTLPMGVVRPLTEVEMDHYREPFLNAVDREPLWRFPNELPIAGEPANIVALVEEYMDWLHQSPVPKLLFWGTPGVLIPPAEAARLAKSLPNCKAVDIGPGLNLLQEDNPDLIGSEIARWLSTLEISGGSGGSGGGGSGGMVFTLEDFVGDWEQTAAYNLDQVLEQGGVSSLLQNLAVSVTPIQRIVRSGENALKIDIHVIIPYEGLSADQMAQIEEVFKVVYPVDDHHFKVILPYGTLVIDGVTPNMLNYFGRPYEGIAVFDGKKITVTGTLWNGNKIIDERLITPDGSMLFRVTINSGSGHHHHHH

SEQ ID NO: 3571 - protein, 457 aa, Synthetic construct
MFHYVDVGPRDGTPVLFLHGNPTSSYVWRNIIPHVAPTHRCIAPDLIGMGKSDKPDLGYFFDDHVRFMDAFIEALGLEEVVLVIHDWGSALGFHWAKRNPERVKGIAFMEFIRPIPTWDEWPEFARETFQAFRTTDVGRKLIIDQNVFIEGTLPMGVVRPLTEVEMDHYREPFLNPVDREPLWRWPNELPIAGEPANIVALVEEYMDWLHQSPVPKLLFWGTPGVLIPPAEAARLAKSLPNCKAVDIGPGLNLLQEDNPDLIGSEIARWLSTLEISGGSGGSGGGGSGGMVFTLEDFVGDWEQTAAYNLDQVLEQGGVSSLLQNLAVSVTPIQRIVRSGENALKIDIHVIIPYEGLSADQMAQIEEVFKVVYPVDDHHFKVILPYGTLVIDGVTPNMLNYFGRPYEGIAVFDGKKITVTGTLWNGNKIIDERLITPDGSMLFRVTINSGSGHHHHHH

SEQ ID NO: 3572 - protein, 457 aa, Synthetic construct
MFHYVDVGPRDGTPVLFLHGNPTSSYVWRNIIPHVAPTHRCIAPDLIGMGKSDKPDLGYFFDDHVRFMDAFIEALGLEEVVLVIHDWGSALGFHWAKRNPERVKGIAFMEFIRPIPTWDEWPEFARETFQAFRTTDVGRKLIIDQNVFIEGTLPMGVVRPLTEVEMDHYREPFLNPVDREPLWRFPNELPIGGEPANIVALVEEYMDWLHQSPVPKLLFWGTPGVLIPPAEAARLAKSLPNCKAVDIGPGLNLLQEDNPDLIGSEIARWLSTLEISGGSGGSGGGGSGGMVFTLEDFVGDWEQTAAYNLDQVLEQGGVSSLLQNLAVSVTPIQRIVRSGENALKIDIHVIIPYEGLSADQMAQIEEVFKVVYPVDDHHFKVILPYGTLVIDGVTPNMLNYFGRPYEGIAVFDGKKITVTGTLWNGNKIIDERLITPDGSMLFRVTINSGSGHHHHHH

SEQ ID NO: 3573 - protein, 457 aa, Synthetic construct
MFHYVDVGPRDGTPVLFLHGNPTSSYVWRNIIPHVAPTHRCIAPDLIGMGKSDKPDLGYFFDDHVRFMDAFIEALGLEEVVLVIHDWGSALGFHWAKRNPERVKGIAFMEFIRPIPTWDEWPEFARETFQAFRTTDVGRKLIIDQNVFIEGTLPMGVVRPLTEVEMDHYREPFLNPVDREPLWRFPNELPIAGEPANIVALAEEYMDWLHQSPVPKLLFWGTPGVLIPPAEAARLAKSLPNCKAVDIGPGLNLLQEDNPDLIGSEIARWLSTLEISGGSGGSGGGGSGGMVFTLEDFVGDWEQTAAYNLDQVLEQGGVSSLLQNLAVSVTPIQRIVRSGENALKIDIHVIIPYEGLSADQMAQIEEVFKVVYPVDDHHFKVILPYGTLVIDGVTPNMLNYFGRPYEGIAVFDGKKITVTGTLWNGNKIIDERLITPDGSMLFRVTINSGSGHHHHHH

SEQ ID NO: 3574 - protein, 457 aa, Synthetic construct
MFHYVDVGPRDGTPVLFLHGNPTSSYVWRNIIPHVAPTHRCIAPDLIGMGKSDKPDLGYFFDDHVRFMDAFIEALGLEEVVLVIHDWGSALGFHWAKRNPERVKGIAFMEFVRTIPTWDEWPEFARETFQAFRTTDVGRKLIIDQNVFIEGTLPMGVVRPLTEVEMDHYREPFLNPVDREPLWRFPNELPIAGEPANIVALVEEYMDWLHQSPVPKLLFWGTPGVLIPPAEAARLAKSLPNCKAVDIGPGLNLLQEDNPDLIGSEIARWLSTLEISGGSGGSGGGGSGGMVFTLEDFVGDWEQTAAYNLDQVLEQGGVSSLLQNLAVSVTPIQRIVRSGENALKIDIHVIIPYEGLSADQMAQIEEVFKVVYPVDDHHFKVILPYGTLVIDGVTPNMLNYFGRPYEGIAVFDGKKITVTGTLWNGNKIIDERLITPDGSMLFRVTINSGSGHHHHHH

SEQ ID NO: 3575 - protein, 457 aa, Synthetic construct
MFHYVDVGPRDGTPVLFLHGNPTSSYVWRNIIPHVAPTHRCIAPDLIGMGKSDKPDLGYFFDDHVRFMDAFIEALGLEEVVLVIHDWGSALGFHWAKRNPERVKGIAFMEFVRPVPTWDEWPEFARETFQAFRTTDVGRKLIIDQNVFIEGTLPMGVVRPLTEVEMDHYREPFLNPVDREPLWRFPNELPIAGEPANIVALVEEYMDWLHQSPVPKLLFWGTPGVLIPPAEAARLAKSLPNCKAVDIGPGLNLLQEDNPDLIGSEIARWLSTLEISGGSGGSGGGGSGGMVFTLEDFVGDWEQTAAYNLDQVLEQGGVSSLLQNLAVSVTPIQRIVRSGENALKIDIHVIIPYEGLSADQMAQIEEVFKVVYPVDDHHFKVILPYGTLVIDGVTPNMLNYFGRPYEGIAVFDGKKITVTGTLWNGNKIIDERLITPDGSMLFRVTINSGSGHHHHHH

SEQ ID NO: 3576 - protein, 457 aa, Synthetic construct
MFHYVDVGPRDGTPVLFLHGNPTSSYVWRNIIPHVAPTHRCIAPDLIGMGKSDKPDLGYFFDDHVRFMDAFIEALGLEEVVLVIHDWGSALGFHWAKRNPERVKGIAFMEFVRPIGTWDEWPEFARETFQAFRTTDVGRKLIIDQNVFIEGTLPMGVVRPLTEVEMDHYREPFLNPVDREPLWRFPNELPIAGEPANIVALVEEYMDWLHQSPVPKLLFWGTPGVLIPPAEAARLAKSLPNCKAVDIGPGLNLLQEDNPDLIGSEIARWLSTLEISGGSGGSGGGGSGGMVFTLEDFVGDWEQTAAYNLDQVLEQGGVSSLLQNLAVSVTPIQRIVRSGENALKIDIHVIIPYEGLSADQMAQIEEVFKVVYPVDDHHFKVILPYGTLVIDGVTPNMLNYFGRPYEGIAVFDGKKITVTGTLWNGNKIIDERLITPDGSMLFRVTINSGSGHHHHHH

SEQ ID NO: 3577 - protein, 457 aa, Synthetic construct
MFHYVDVGPRDGTPVLFLHGNPTSSYVWRNIIPHVAPTHRCIAPDLIGMGKSDKPDLGYFFDDHVRFMDAFIEALGLEEVVLVIHDWGSALGFHWAKRNPERVKGIAFMEFVRPIPDWDEWPEFARETFQAFRTTDVGRKLIIDQNVFIEGTLPMGVVRPLTEVEMDHYREPFLNPVDREPLWRFPNELPIAGEPANIVALVEEYMDWLHQSPVPKLLFWGTPGVLIPPAEAARLAKSLPNCKAVDIGPGLNLLQEDNPDLIGSEIARWLSTLEISGGSGGSGGGGSGGMVFTLEDFVGDWEQTAAYNLDQVLEQGGVSSLLQNLAVSVTPIQRIVRSGENALKIDIHVIIPYEGLSADQMAQIEEVFKVVYPVDDHHFKVILPYGTLVIDGVTPNMLNYFGRPYEGIAVFDGKKITVTGTLWNGNKIIDERLITPDGSMLFRVTINSGSGHHHHHH

SEQ ID NO: 3578 - protein, 457 aa, Synthetic construct
MFHYVDVGPRDGTPVLFLHGNPTSSYVWRNIIPHVAPTHRCIAPDLIGMGKSDKPDLGYFFDDHVRFMDAFIEALGLEEVVLVIHDWGSALGFHWAKRNPERVKGIAFMEFVRPIPTWDEWPEFARKTFQAFRTTDVGRKLIIDQNVFIEGTLPMGVVRPLTEVEMDHYREPFLNPVDREPLWRFPNELPIAGEPANIVALVEEYMDWLHQSPVPKLLFWGTPGVLIPPAEAARLAKSLPNCKAVDIGPGLNLLQEDNPDLIGSEIARWLSTLEISGGSGGSGGGGSGGMVFTLEDFVGDWEQTAAYNLDQVLEQGGVSSLLQNLAVSVTPIQRIVRSGENALKIDIHVIIPYEGLSADQMAQIEEVFKVVYPVDDHHFKVILPYGTLVIDGVTPNMLNYFGRPYEGIAVFDGKKITVTGTLWNGNKIIDERLITPDGSMLFRVTINSGSGHHHHHH

SEQ ID NO: 3579 - protein, 457 aa, Synthetic construct
MFHYVDVGPRDGTPVLFLHGNPTSSYVWRNIIPHVAPTHRCIAPDLIGMGKSDKPDLGYFFDDHVRFMDAFIEALGLEEVVLVIHDWGSALGFHWAKRNPERVKGIAFMEFVRPIPTWDEWPEFARETFRAFRTTDVGRKLIIDQNVFIEGTLPMGVVRPLTEVEMDHYREPFLNPVDREPLWRFPNELPIAGEPANIVALVEEYMDWLHQSPVPKLLFWGTPGVLIPPAEAARLAKSLPNCKAVDIGPGLNLLQEDNPDLIGSEIARWLSTLEISGGSGGSGGGGSGGMVFTLEDFVGDWEQTAAYNLDQVLEQGGVSSLLQNLAVSVTPIQRIVRSGENALKIDIHVIIPYEGLSADQMAQIEEVFKVVYPVDDHHFKVILPYGTLVIDGVTPNMLNYFGRPYEGIAVFDGKKITVTGTLWNGNKIIDERLITPDGSMLFRVTINSGSGHHHHHH

SEQ ID NO: 3580 - protein, 457 aa, Synthetic construct
MFHYVDVGPRDGTPVLFLHGNPTSSYVWRNIIPHVAPTHRCIAPDLIGMGKSDKPDLGYFFDDHVRFMDAFIEALGLEEVVLVIHDWGSALGFHWAKRNPERVKGIAFMEFVRPIPTWDEWPEFARETFQRFRTTDVGRKLIIDQNVFIEGTLPMGVVRPLTEVEMDHYREPFLNPVDREPLWRFPNELPIAGEPANIVALVEEYMDWLHQSPVPKLLFWGTPGVLIPPAEAARLAKSLPNCKAVDIGPGLNLLQEDNPDLIGSEIARWLSTLEISGGSGGSGGGGSGGMVFTLEDFVGDWEQTAAYNLDQVLEQGGVSSLLQNLAVSVTPIQRIVRSGENALKIDIHVIIPYEGLSADQMAQIEEVFKVVYPVDDHHFKVILPYGTLVIDGVTPNMLNYFGRPYEGIAVFDGKKITVTGTLWNGNKIIDERLITPDGSMLFRVTINSGSGHHHHHH

SEQ ID NO: 3581 - protein, 457 aa, Synthetic construct
MFHYVDVGPRDGTPVLFLHGNPTSSYVWRNIIPHVAPTHRCIAPDLIGMGKSDKPDLGYFFDDHVRFMDAFIEALGLEEVVLVIHDWGSALGFHWAKRNPERVKGIAFMEFVRPIPTWDEWPEFARETFQAFRTTDVGRELIIDQNVFIEGTLPMGVVRPLTEVEMDHYREPFLNPVDREPLWRFPNELPIAGEPANIVALVEEYMDWLHQSPVPKLLFWGTPGVLIPPAEAARLAKSLPNCKAVDIGPGLNLLQEDNPDLIGSEIARWLSTLEISGGSGGSGGGGSGGMVFTLEDFVGDWEQTAAYNLDQVLEQGGVSSLLQNLAVSVTPIQRIVRSGENALKIDIHVIIPYEGLSADQMAQIEEVFKVVYPVDDHHFKVILPYGTLVIDGVTPNMLNYFGRPYEGIAVFDGKKITVTGTLWNGNKIIDERLITPDGSMLFRVTINSGSGHHHHHH

SEQ ID NO: 3582 - protein, 457 aa, Synthetic construct
MFHYVDVGPRDGTPVLFLHGNPTSSYVWRNIIPHVAPTHRCIAPDLIGMGKSDKPDLGYFFDDHVRFMDAFIEALGLEEVVLVIHDWGSALGFHWAKRNPERVKGIAFMEFVRPIPTWDEWPEFARETFQAFRTTDVGRKLIIDQNVIIEGTLPMGVVRPLTEVEMDHYREPFLNPVDREPLWRFPNELPIAGEPANIVALVEEYMDWLHQSPVPKLLFWGTPGVLIPPAEAARLAKSLPNCKAVDIGPGLNLLQEDNPDLIGSEIARWLSTLEISGGSGGSGGGGSGGMVFTLEDFVGDWEQTAAYNLDQVLEQGGVSSLLQNLAVSVTPIQRIVRSGENALKIDIHVIIPYEGLSADQMAQIEEVFKVVYPVDDHHFKVILPYGTLVIDGVTPNMLNYFGRPYEGIAVFDGKKITVTGTLWNGNKIIDERLITPDGSMLFRVTINSGSGHHHHHH

SEQ ID NO: 3583 - protein, 457 aa, Synthetic construct
MFHYVDVGPRDGTPVLFLHGNPTSSYVWRNIIPHVAPTHRCIAPDLIGMGKSDKPDLGYFFDDHVRFMDAFIEALGLEEVVLVIHDWGSALGFHWAKRNPERVKGIAFMEFVRPIPTWDEWPEFARETFQAFRTTDVGRKLIIDQNVLIEGTLPMGVVRPLTEVEMDHYREPFLNPVDREPLWRFPNELPIAGEPANIVALVEEYMDWLHQSPVPKLLFWGTPGVLIPPAEAARLAKSLPNCKAVDIGPGLNLLQEDNPDLIGSEIARWLSTLEISGGSGGSGGGGSGGMVFTLEDFVGDWEQTAAYNLDQVLEQGGVSSLLQNLAVSVTPIQRIVRSGENALKIDIHVIIPYEGLSADQMAQIEEVFKVVYPVDDHHFKVILPYGTLVIDGVTPNMLNYFGRPYEGIAVFDGKKITVTGTLWNGNKIIDERLITPDGSMLFRVTINSGSGHHHHHH

SEQ ID NO: 3584 - protein, 457 aa, Synthetic construct
MFHYVDVGPRDGTPVLFLHGNPTSSYVWRNIIPHVAPTHRCIAPDLIGMGKSDKPDLGYFFDDHVRFMDAFIEALGLEEVVLVIHDWGSALGFHWAKRNPERVKGIAFMEFVRPIPTWDEWPEFARETFQAFRTTDVGRKLIIDQNVFIEGTLRMGVVRPLTEVEMDHYREPFLNPVDREPLWRFPNELPIAGEPANIVALVEEYMDWLHQSPVPKLLFWGTPGVLIPPAEAARLAKSLPNCKAVDIGPGLNLLQEDNPDLIGSEIARWLSTLEISGGSGGSGGGGSGGMVFTLEDFVGDWEQTAAYNLDQVLEQGGVSSLLQNLAVSVTPIQRIVRSGENALKIDIHVIIPYEGLSADQMAQIEEVFKVVYPVDDHHFKVILPYGTLVIDGVTPNMLNYFGRPYEGIAVFDGKKITVTGTLWNGNKIIDERLITPDGSMLFRVTINSGSGHHHHHH

SEQ ID NO: 3585 - protein, 457 aa, Synthetic construct
MFHYVDVGPRDGTPVLFLHGNPTSSYVWRNIIPHVAPTHRCIAPDLIGMGKSDKPDLGYFFDDHVRFMDAFIEALGLEEVVLVIHDWGSALGFHWAKRNPERVKGIAFMEFVRPIPTWDEWPEFARETFQAFRTTDVGRKLIIDQNVFIEGTLPMGVVRPLTEVEMDHYREPFLNAVDREPLWRFPNELPIAGEPANIVALVEEYMDWLHQSPVPKLLFWGTPGVLIPPAEAARLAKSLPNCKAVDIGPGLNLLQEDNPDLIGSEIARWLSTLEISGGSGGSGGGGSGGMVFTLEDFVGDWEQTAAYNLDQVLEQGGVSSLLQNLAVSVTPIQRIVRSGENALKIDIHVIIPYEGLSADQMAQIEEVFKVVYPVDDHHFKVILPYGTLVIDGVTPNMLNYFGRPYEGIAVFDGKKITVTGTLWNGNKIIDERLITPDGSMLFRVTINSGSGHHHHHH

SEQ ID NO: 3586 - protein, 457 aa, Synthetic construct
MFHYVDVGPRDGTPVLFLHGNPTSSYVWRNIIPHVAPTHRCIAPDLIGMGKSDKPDLGYFFDDHVRFMDAFIEALGLEEVVLVIHDWGSALGFHWAKRNPERVKGIAFMEFVRPIPTWDEWPEFARETFQAFRTTDVGRKLIIDQNVFIEGTLPMGVVRPLTEVEMDHYREPFLNPVDREPLWRWPNELPIAGEPANIVALVEEYMDWLHQSPVPKLLFWGTPGVLIPPAEAARLAKSLPNCKAVDIGPGLNLLQEDNPDLIGSEIARWLSTLEISGGSGGSGGGGSGGMVFTLEDFVGDWEQTAAYNLDQVLEQGGVSSLLQNLAVSVTPIQRIVRSGENALKIDIHVIIPYEGLSADQMAQIEEVFKVVYPVDDHHFKVILPYGTLVIDGVTPNMLNYFGRPYEGIAVFDGKKITVTGTLWNGNKIIDERLITPDGSMLFRVTINSGSGHHHHHH

SEQ ID NO: 3587 - protein, 457 aa, Synthetic construct
MFHYVDVGPRDGTPVLFLHGNPTSSYVWRNIIPHVAPTHRCIAPDLIGMGKSDKPDLGYFFDDHVRFMDAFIEALGLEEVVLVIHDWGSALGFHWAKRNPERVKGIAFMEFVRPIPTWDEWPEFARETFQAFRTTDVGRKLIIDQNVFIEGTLPMGVVRPLTEVEMDHYREPFLNPVDREPLWRFPNELPIGGEPANIVALVEEYMDWLHQSPVPKLLFWGTPGVLIPPAEAARLAKSLPNCKAVDIGPGLNLLQEDNPDLIGSEIARWLSTLEISGGSGGSGGGGSGGMVFTLEDFVGDWEQTAAYNLDQVLEQGGVSSLLQNLAVSVTPIQRIVRSGENALKIDIHVIIPYEGLSADQMAQIEEVFKVVYPVDDHHFKVILPYGTLVIDGVTPNMLNYFGRPYEGIAVFDGKKITVTGTLWNGNKIIDERLITPDGSMLFRVTINSGSGHHHHHH

SEQ ID NO: 3588 - protein, 457 aa, Synthetic construct
MFHYVDVGPRDGTPVLFLHGNPTSSYVWRNIIPHVAPTHRCIAPDLIGMGKSDKPDLGYFFDDHVRFMDAFIEALGLEEVVLVIHDWGSALGFHWAKRNPERVKGIAFMEFVRPIPTWDEWPEFARETFQAFRTTDVGRKLIIDQNVFIEGTLPMGVVRPLTEVEMDHYREPFLNPVDREPLWRFPNELPIAGEPANIVALAEEYMDWLHQSPVPKLLFWGTPGVLIPPAEAARLAKSLPNCKAVDIGPGLNLLQEDNPDLIGSEIARWLSTLEISGGSGGSGGGGSGGMVFTLEDFVGDWEQTAAYNLDQVLEQGGVSSLLQNLAVSVTPIQRIVRSGENALKIDIHVIIPYEGLSADQMAQIEEVFKVVYPVDDHHFKVILPYGTLVIDGVTPNMLNYFGRPYEGIAVFDGKKITVTGTLWNGNKIIDERLITPDGSMLFRVTINSGSGHHHHHH

SEQ ID NO: 3589 - protein, 457 aa, Synthetic construct; identical to SEQ ID NO: 3574

SEQ ID NO: 3590 - protein, 457 aa, Synthetic construct
MFHYVDVGPRDGTPVLFLHGNPTSSYVWRNIIPHVAPTHRCIAPDLIGMGKSDKPDLGYFFDDHVRFMDAFIEALGLEEVVLVIHDWGSALGFHWAKRNPERVKGIAFMEFIRTVPTWDEWPEFARETFQAFRTTDVGRKLIIDQNVFIEGTLPMGVVRPLTEVEMDHYREPFLNPVDREPLWRFPNELPIAGEPANIVALVEEYMDWLHQSPVPKLLFWGTPGVLIPPAEAARLAKSLPNCKAVDIGPGLNLLQEDNPDLIGSEIARWLSTLEISGGSGGSGGGGSGGMVFTLEDFVGDWEQTAAYNLDQVLEQGGVSSLLQNLAVSVTPIQRIVRSGENALKIDIHVIIPYEGLSADQMAQIEEVFKVVYPVDDHHFKVILPYGTLVIDGVTPNMLNYFGRPYEGIAVFDGKKITVTGTLWNGNKIIDERLITPDGSMLFRVTINSGSGHHHHHH

SEQ ID NO: 3591 - protein, 457 aa, Synthetic construct
MFHYVDVGPRDGTPVLFLHGNPTSSYVWRNIIPHVAPTHRCIAPDLIGMGKSDKPDLGYFFDDHVRFMDAFIEALGLEEVVLVIHDWGSALGFHWAKRNPERVKGIAFMEFIRTIGTWDEWPEFARETFQAFRTTDVGRKLIIDQNVFIEGTLPMGVVRPLTEVEMDHYREPFLNPVDREPLWRFPNELPIAGEPANIVALVEEYMDWLHQSPVPKLLFWGTPGVLIPPAEAARLAKSLPNCKAVDIGPGLNLLQEDNPDLIGSEIARWLSTLEISGGSGGSGGGGSGGMVFTLEDFVGDWEQTAAYNLDQVLEQGGVSSLLQNLAVSVTPIQRIVRSGENALKIDIHVIIPYEGLSADQMAQIEEVFKVVYPVDDHHFKVILPYGTLVIDGVTPNMLNYFGRPYEGIAVFDGKKITVTGTLWNGNKIIDERLITPDGSMLFRVTINSGSGHHHHHH

SEQ ID NO: 3592 - protein, 457 aa, Synthetic construct
MFHYVDVGPRDGTPVLFLHGNPTSSYVWRNIIPHVAPTHRCIAPDLIGMGKSDKPDLGYFFDDHVRFMDAFIEALGLEEVVLVIHDWGSALGFHWAKRNPERVKGIAFMEFIRTIPDWDEWPEFARETFQAFRTTDVGRKLIIDQNVFIEGTLPMGVVRPLTEVEMDHYREPFLNPVDREPLWRFPNELPIAGEPANIVALVEEYMDWLHQSPVPKLLFWGTPGVLIPPAEAARLAKSLPNCKAVDIGPGLNLLQEDNPDLIGSEIARWLSTLEISGGSGGSGGGGSGGMVFTLEDFVGDWEQTAAYNLDQVLEQGGVSSLLQNLAVSVTPIQRIVRSGENALKIDIHVIIPYEGLSADQMAQIEEVFKVVYPVDDHHFKVILPYGTLVIDGVTPNMLNYFGRPYEGIAVFDGKKITVTGTLWNGNKIIDERLITPDGSMLFRVTINSGSGHHHHHH

SEQ ID NO: 3593 - protein, 457 aa, Synthetic construct
MFHYVDVGPRDGTPVLFLHGNPTSSYVWRNIIPHVAPTHRCIAPDLIGMGKSDKPDLGYFFDDHVRFMDAFIEALGLEEVVLVIHDWGSALGFHWAKRNPERVKGIAFMEFIRTIPTWDEWPEFARKTFQAFRTTDVGRKLIIDQNVFIEGTLPMGVVRPLTEVEMDHYREPFLNPVDREPLWRFPNELPIAGEPANIVALVEEYMDWLHQSPVPKLLFWGTPGVLIPPAEAARLAKSLPNCKAVDIGPGLNLLQEDNPDLIGSEIARWLSTLEISGGSGGSGGGGSGGMVFTLEDFVGDWEQTAAYNLDQVLEQGGVSSLLQNLAVSVTPIQRIVRSGENALKIDIHVIIPYEGLSADQMAQIEEVFKVVYPVDDHHFKVILPYGTLVIDGVTPNMLNYFGRPYEGIAVFDGKKITVTGTLWNGNKIIDERLITPDGSMLFRVTINSGSGHHHHHH

SEQ ID NO: 3594 - protein, 457 aa, Synthetic construct
MFHYVDVGPRDGTPVLFLHGNPTSSYVWRNIIPHVAPTHRCIAPDLIGMGKSDKPDLGYFFDDHVRFMDAFIEALGLEEVVLVIHDWGSALGFHWAKRNPERVKGIAFMEFIRTIPTWDEWPEFARETFRAFRTTDVGRKLIIDQNVFIEGTLPMGVVRPLTEVEMDHYREPFLNPVDREPLWRFPNELPIAGEPANIVALVEEYMDWLHQSPVPKLLFWGTPGVLIPPAEAARLAKSLPNCKAVDIGPGLNLLQEDNPDLIGSEIARWLSTLEISGGSGGSGGGGSGGMVFTLEDFVGDWEQTAAYNLDQVLEQGGVSSLLQNLAVSVTPIQRIVRSGENALKIDIHVIIPYEGLSADQMAQIEEVFKVVYPVDDHHFKVILPYGTLVIDGVTPNMLNYFGRPYEGIAVFDGKKITVTGTLWNGNKIIDERLITPDGSMLFRVTINSGSGHHHHHH

SEQ ID NO: 3595 - protein, 457 aa, Synthetic construct
MFHYVDVGPRDGTPVLFLHGNPTSSYVWRNIIPHVAPTHRCIAPDLIGMGKSDKPDLGYFFDDHVRFMDAFIEALGLEEVVLVIHDWGSALGFHWAKRNPERVKGIAFMEFIRTIPTWDEWPEFARETFQRFRTTDVGRKLIIDQNVFIEGTLPMGVVRPLTEVEMDHYREPFLNPVDREPLWRFPNELPIAGEPANIVALVEEYMDWLHQSPVPKLLFWGTPGVLIPPAEAARLAKSLPNCKAVDIGPGLNLLQEDNPDLIGSEIARWLSTLEISGGSGGSGGGGSGGMVFTLEDFVGDWEQTAAYNLDQVLEQGGVSSLLQNLAVSVTPIQRIVRSGENALKIDIHVIIPYEGLSADQMAQIEEVFKVVYPVDDHHFKVILPYGTLVIDGVTPNMLNYFGRPYEGIAVFDGKKITVTGTLWNGNKIIDERLITPDGSMLFRVTINSGSGHHHHHH

SEQ ID NO: 3596 - protein, 457 aa, Synthetic construct
MFHYVDVGPRDGTPVLFLHGNPTSSYVWRNIIPHVAPTHRCIAPDLIGMGKSDKPDLGYFFDDHVRFMDAFIEALGLEEVVLVIHDWGSALGFHWAKRNPERVKGIAFMEFIRTIPTWDEWPEFARETFQAFRTTDVGRELIIDQNVFIEGTLPMGVVRPLTEVEMDHYREPFLNPVDREPLWRFPNELPIAGEPANIVALVEEYMDWLHQSPVPKLLFWGTPGVLIPPAEAARLAKSLPNCKAVDIGPGLNLLQEDNPDLIGSEIARWLSTLEISGGSGGSGGGGSGGMVFTLEDFVGDWEQTAAYNLDQVLEQGGVSSLLQNLAVSVTPIQRIVRSGENALKIDIHVIIPYEGLSADQMAQIEEVFKVVYPVDDHHFKVILPYGTLVIDGVTPNMLNYFGRPYEGIAVFDGKKITVTGTLWNGNKIIDERLITPDGSMLFRVTINSGSGHHHHHH

SEQ ID NO: 3597 - protein, 457 aa, Synthetic construct
MFHYVDVGPRDGTPVLFLHGNPTSSYVWRNIIPHVAPTHRCIAPDLIGMGKSDKPDLGYFFDDHVRFMDAFIEALGLEEVVLVIHDWGSALGFHWAKRNPERVKGIAFMEFIRTIPTWDEWPEFARETFQAFRTTDVGRKLIIDQNVIIEGTLPMGVVRPLTEVEMDHYREPFLNPVDREPLWRFPNELPIAGEPANIVALVEEYMDWLHQSPVPKLLFWGTPGVLIPPAEAARLAKSLPNCKAVDIGPGLNLLQEDNPDLIGSEIARWLSTLEISGGSGGSGGGGSGGMVFTLEDFVGDWEQTAAYNLDQVLEQGGVSSLLQNLAVSVTPIQRIVRSGENALKIDIHVIIPYEGLSADQMAQIEEVFKVVYPVDDHHFKVILPYGTLVIDGVTPNMLNYFGRPYEGIAVFDGKKITVTGTLWNGNKIIDERLITPDGSMLFRVTINSGSGHHHHHH

SEQ ID NO: 3598 - protein, 457 aa, Synthetic construct
MFHYVDVGPRDGTPVLFLHGNPTSSYVWRNIIPHVAPTHRCIAPDLIGMGKSDKPDLGYFFDDHVRFMDAFIEALGLEEVVLVIHDWGSALGFHWAKRNPERVKGIAFMEFIRTIPTWDEWPEFARETFQAFRTTDVGRKLIIDQNVLIEGTLPMGVVRPLTEVEMDHYREPFLNPVDREPLWRFPNELPIAGEPANIVALVEEYMDWLHQSPVPKLLFWGTPGVLIPPAEAARLAKSLPNCKAVDIGPGLNLLQEDNPDLIGSEIARWLSTLEISGGSGGSGGGGSGGMVFTLEDFVGDWEQTAAYNLDQVLEQGGVSSLLQNLAVSVTPIQRIVRSGENALKIDIHVIIPYEGLSADQMAQIEEVFKVVYPVDDHHFKVILPYGTLVIDGVTPNMLNYFGRPYEGIAVFDGKKITVTGTLWNGNKIIDERLITPDGSMLFRVTINSGSGHHHHHH

SEQ ID NO: 3599 - protein, 457 aa, Synthetic construct
MFHYVDVGPRDGTPVLFLHGNPTSSYVWRNIIPHVAPTHRCIAPDLIGMGKSDKPDLGYFFDDHVRFMDAFIEALGLEEVVLVIHDWGSALGFHWAKRNPERVKGIAFMEFIRTIPTWDEWPEFARETFQAFRTTDVGRKLIIDQNVFIEGTLRMGVVRPLTEVEMDHYREPFLNPVDREPLWRFPNELPIAGEPANIVALVEEYMDWLHQSPVPKLLFWGTPGVLIPPAEAARLAKSLPNCKAVDIGPGLNLLQEDNPDLIGSEIARWLSTLEISGGSGGSGGGGSGGMVFTLEDFVGDWEQTAAYNLDQVLEQGGVSSLLQNLAVSVTPIQRIVRSGENALKIDIHVIIPYEGLSADQMAQIEEVFKVVYPVDDHHFKVILPYGTLVIDGVTPNMLNYFGRPYEGIAVFDGKKITVTGTLWNGNKIIDERLITPDGSMLFRVTINSGSGHHHHHH

SEQ ID NO: 3600 - protein, 457 aa, Synthetic construct
MFHYVDVGPRDGTPVLFLHGNPTSSYVWRNIIPHVAPTHRCIAPDLIGMGKSDKPDLGYFFDDHVRFMDAFIEALGLEEVVLVIHDWGSALGFHWAKRNPERVKGIAFMEFIRTIPTWDEWPEFARETFQAFRTTDVGRKLIIDQNVFIEGTLPMGVVRPLTEVEMDHYREPFLNAVDREPLWRFPNELPIAGEPANIVALVEEYMDWLHQSPVPKLLFWGTPGVLIPPAEAARLAKSLPNCKAVDIGPGLNLLQEDNPDLIGSEIARWLSTLEISGGSGGSGGGGSGGMVFTLEDFVGDWEQTAAYNLDQVLEQGGVSSLLQNLAVSVTPIQRIVRSGENALKIDIHVIIPYEGLSADQMAQIEEVFKVVYPVDDHHFKVILPYGTLVIDGVTPNMLNYFGRPYEGIAVFDGKKITVTGTLWNGNKIIDERLITPDGSMLFRVTINSGSGHHHHHH

SEQ ID NO: 3601 - protein, 457 aa, Synthetic construct
MFHYVDVGPRDGTPVLFLHGNPTSSYVWRNIIPHVAPTHRCIAPDLIGMGKSDKPDLGYFFDDHVRFMDAFIEALGLEEVVLVIHDWGSALGFHWAKRNPERVKGIAFMEFIRTIPTWDEWPEFARETFQAFRTTDVGRKLIIDQNVFIEGTLPMGVVRPLTEVEMDHYREPFLNPVDREPLWRWPNELPIAGEPANIVALVEEYMDWLHQSPVPKLLFWGTPGVLIPPAEAARLAKSLPNCKAVDIGPGLNLLQEDNPDLIGSEIARWLSTLEISGGSGGSGGGGSGGMVFTLEDFVGDWEQTAAYNLDQVLEQGGVSSLLQNLAVSVTPIQRIVRSGENALKIDIHVIIPYEGLSADQMAQIEEVFKVVYPVDDHHFKVILPYGTLVIDGVTPNMLNYFGRPYEGIAVFDGKKITVTGTLWNGNKIIDERLITPDGSMLFRVTINSGSGHHHHHH

SEQ ID NO: 3602 - protein, 457 aa, Synthetic construct
MFHYVDVGPRDGTPVLFLHGNPTSSYVWRNIIPHVAPTHRCIAPDLIGMGKSDKPDLGYFFDDHVRFMDAFIEALGLEEVVLVIHDWGSALGFHWAKRNPERVKGIAFMEFIRTIPTWDEWPEFARETFQAFRTTDVGRKLIIDQNVFIEGTLPMGVVRPLTEVEMDHYREPFLNPVDREPLWRFPNELPIGGEPANIVALVEEYMDWLHQSPVPKLLFWGTPGVLIPPAEAARLAKSLPNCKAVDIGPGLNLLQEDNPDLIGSEIARWLSTLEISGGSGGSGGGGSGGMVFTLEDFVGDWEQTAAYNLDQVLEQGGVSSLLQNLAVSVTPIQRIVRSGENALKIDIHVIIPYEGLSADQMAQIEEVFKVVYPVDDHHFKVILPYGTLVIDGVTPNMLNYFGRPYEGIAVFDGKKITVTGTLWNGNKIIDERLITPDGSMLFRVTINSGSGHHHHHH

SEQ ID NO: 3603 - protein, 457 aa, Synthetic construct
MFHYVDVGPRDGTPVLFLHGNPTSSYVWRNIIPHVAPTHRCIAPDLIGMGKSDKPDLGYFFDDHVRFMDAFIEALGLEEVVLVIHDWGSALGFHWAKRNPERVKGIAFMEFIRTIPTWDEWPEFARETFQAFRTTDVGRKLIIDQNVFIEGTLPMGVVRPLTEVEMDHYREPFLNPVDREPLWRFPNELPIAGEPANIVALAEEYMDWLHQSPVPKLLFWGTPGVLIPPAEAARLAKSLPNCKAVDIGPGLNLLQEDNPDLIGSEIARWLSTLEISGGSGGSGGGGSGGMVFTLEDFVGDWEQTAAYNLDQVLEQGGVSSLLQNLAVSVTPIQRIVRSGENALKIDIHVIIPYEGLSADQMAQIEEVFKVVYPVDDHHFKVILPYGTLVIDGVTPNMLNYFGRPYEGIAVFDGKKITVTGTLWNGNKIIDERLITPDGSMLFRVTINSGSGHHHHHH

SEQ ID NO: 3604 - protein, 457 aa, Synthetic construct; identical to SEQ ID NO: 3575

SEQ ID NO: 3605 - protein, 457 aa, Synthetic construct; identical to SEQ ID NO: 3590

SEQ ID NO: 3606 - protein, 457 aa, Synthetic construct
MFHYVDVGPRDGTPVLFLHGNPTSSYVWRNIIPHVAPTHRCIAPDLIGMGKSDKPDLGYFFDDHVRFMDAFIEALGLEEVVLVIHDWGSALGFHWAKRNPERVKGIAFMEFIRPVGTWDEWPEFARETFQAFRTTDVGRKLIIDQNVFIEGTLPMGVVRPLTEVEMDHYREPFLNPVDREPLWRFPNELPIAGEPANIVALVEEYMDWLHQSPVPKLLFWGTPGVLIPPAEAARLAKSLPNCKAVDIGPGLNLLQEDNPDLIGSEIARWLSTLEISGGSGGSGGGGSGGMVFTLEDFVGDWEQTAAYNLDQVLEQGGVSSLLQNLAVSVTPIQRIVRSGENALKIDIHVIIPYEGLSADQMAQIEEVFKVVYPVDDHHFKVILPYGTLVIDGVTPNMLNYFGRPYEGIAVFDGKKITVTGTLWNGNKIIDERLITPDGSMLFRVTINSGSGHHHHHH

SEQ ID NO: 3607 - protein, 457 aa, Synthetic construct
MFHYVDVGPRDGTPVLFLHGNPTSSYVWRNIIPHVAPTHRCIAPDLIGMGKSDKPDLGYFFDDHVRFMDAFIEALGLEEVVLVIHDWGSALGFHWAKRNPERVKGIAFMEFIRPVPDWDEWPEFARETFQAFRTTDVGRKLIIDQNVFIEGTLPMGVVRPLTEVEMDHYREPFLNPVDREPLWRFPNELPIAGEPANIVALVEEYMDWLHQSPVPKLLFWGTPGVLIPPAEAARLAKSLPNCKAVDIGPGLNLLQEDNPDLIGSEIARWLSTLEISGGSGGSGGGGSGGMVFTLEDFVGDWEQTAAYNLDQVLEQGGVSSLLQNLAVSVTPIQRIVRSGENALKIDIHVIIPYEGLSADQMAQIEEVFKVVYPVDDHHFKVILPYGTLVIDGVTPNMLNYFGRPYEGIAVFDGKKITVTGTLWNGNKIIDERLITPDGSMLFRVTINSGSGHHHHHH

SEQ ID NO: 3608 - protein, 457 aa, Synthetic construct
MFHYVDVGPRDGTPVLFLHGNPTSSYVWRNIIPHVAPTHRCIAPDLIGMGKSDKPDLGYFFDDHVRFMDAFIEALGLEEVVLVIHDWGSALGFHWAKRNPERVKGIAFMEFIRPVPTWDEWPEFARKTFQAFRTTDVGRKLIIDQNVFIEGTLPMGVVRPLTEVEMDHYREPFLNPVDREPLWRFPNELPIAGEPANIVALVEEYMDWLHQSPVPKLLFWGTPGVLIPPAEAARLAKSLPNCKAVDIGPGLNLLQEDNPDLIGSEIARWLSTLEISGGSGGSGGGGSGGMVFTLEDFVGDWEQTAAYNLDQVLEQGGVSSLLQNLAVSVTPIQRIVRSGENALKIDIHVIIPYEGLSADQMAQIEEVFKVVYPVDDHHFKVILPYGTLVIDGVTPNMLNYFGRPYEGIAVFDGKKITVTGTLWNGNKIIDERLITPDGSMLFRVTINSGSGHHHHHH

SEQ ID NO: 3609 - protein, 457 aa, Synthetic construct
MFHYVDVGPRDGTPVLFLHGNPTSSYVWRNIIPHVAPTHRCIAPDLIGMGKSDKPDLGYFFDDHVRFMDAFIEALGLEEVVLVIHDWGSALGFHWAKRNPERVKGIAFMEFIRPVPTWDEWPEFARETFRAFRTTDVGRKLIIDQNVFIEGTLPMGVVRPLTEVEMDHYREPFLNPVDREPLWRFPNELPIAGEPANIVALVEEYMDWLHQSPVPKLLFWGTPGVLIPPAEAARLAKSLPNCKAVDIGPGLNLLQEDNPDLIGSEIARWLSTLEISGGSGGSGGGGSGGMVFTLEDFVGDWEQTAAYNLDQVLEQGGVSSLLQNLAVSVTPIQRIVRSGENALKIDIHVIIPYEGLSADQMAQIEEVFKVVYPVDDHHFKVILPYGTLVIDGVTPNMLNYFGRPYEGIAVFDGKKITVTGTLWNGNKIIDERLITPDGSMLFRVTINSGSGHHHHHH

SEQ ID NO: 3610 - protein, 457 aa, Synthetic construct
MFHYVDVGPRDGTPVLFLHGNPTSSYVWRNIIPHVAPTHRCIAPDLIGMGKSDKPDLGYFFDDHVRFMDAFIEALGLEEVVLVIHDWGSALGFHWAKRNPERVKGIAFMEFIRPVPTWDEWPEFARETFQRFRTTDVGRKLIIDQNVFIEGTLPMGVVRPLTEVEMDHYREPFLNPVDREPLWRFPNELPIAGEPANIVALVEEYMDWLHQSPVPKLLFWGTPGVLIPPAEAARLAKSLPNCKAVDIGPGLNLLQEDNPDLIGSEIARWLSTLEISGGSGGSGGGGSGGMVFTLEDFVGDWEQTAAYNLDQVLEQGGVSSLLQNLAVSVTPIQRIVRSGENALKIDIHVIIPYEGLSADQMAQIEEVFKVVYPVDDHHFKVILPYGTLVIDGVTPNMLNYFGRPYEGIAVFDGKKITVTGTLWNGNKIIDERLITPDGSMLFRVTINSGSGHHHHHH

SEQ ID NO: 3611 - protein, 457 aa, Synthetic construct
MFHYVDVGPRDGTPVLFLHGNPTSSYVWRNIIPHVAPTHRCIAPDLIGMGKSDKPDLGYFFDDHVRFMDAFIEALGLEEVVLVIHDWGSALGFHWAKRNPERVKGIAFMEFIRPVPTWDEWPEFARETFQAFRTTDVGRELIIDQNVFIEGTLPMGVVRPLTEVEMDHYREPFLNPVDREPLWRFPNELPIAGEPANIVALVEEYMDWLHQSPVPKLLFWGTPGVLIPPAEAARLAKSLPNCKAVDIGPGLNLLQEDNPDLIGSEIARWLSTLEISGGSGGSGGGGSGGMVFTLEDFVGDWEQTAAYNLDQVLEQGGVSSLLQNLAVSVTPIQRIVRSGENALKIDIHVIIPYEGLSADQMAQIEEVFKVVYPVDDHHFKVILPYGTLVIDGVTPNMLNYFGRPYEGIAVFDGKKITVTGTLWNGNKIIDERLITPDGSMLFRVTINSGSGHHHHHH

SEQ ID NO: 3612 - protein, 457 aa, Synthetic construct
MFHYVDVGPRDGTPVLFLHGNPTSSYVWRNIIPHVAPTHRCIAPDLIGMGKSDKPDLGYFFDDHVRFMDAFIEALGLEEVVLVIHDWGSALGFHWAKRNPERVKGIAFMEFIRPVPTWDEWPEFARETFQAFRTTDVGRKLIIDQNVIIEGTLPMGVVRPLTEVEMDHYREPFLNPVDREPLWRFPNELPIAGEPANIVALVEEYMDWLHQSPVPKLLFWGTPGVLIPPAEAARLAKSLPNCKAVDIGPGLNLLQEDNPDLIGSEIARWLSTLEISGGSGGSGGGGSGGMVFTLEDFVGDWEQTAAYNLDQVLEQGGVSSLLQNLAVSVTPIQRIVRSGENALKIDIHVIIPYEGLSADQMAQIEEVFKVVYPVDDHHFKVILPYGTLVIDGVTPNMLNYFGRPYEGIAVFDGKKITVTGTLWNGNKIIDERLITPDGSMLFRVTINSGSGHHHHHH

SEQ ID NO: 3613 - protein, 457 aa, Synthetic construct
MFHYVDVGPRDGTPVLFLHGNPTSSYVWRNIIPHVAPTHRCIAPDLIGMGKSDKPDLGYFFDDHVRFMDAFIEALGLEEVVLVIHDWGSALGFHWAKRNPERVKGIAFMEFIRPVPTWDEWPEFARETFQAFRTTDVGRKLIIDQNVLIEGTLPMGVVRPLTEVEMDHYREPFLNPVDREPLWRFPNELPIAGEPANIVALVEEYMDWLHQSPVPKLLFWGTPGVLIPPAEAARLAKSLPNCKAVDIGPGLNLLQEDNPDLIGSEIARWLSTLEISGGSGGSGGGGSGGMVFTLEDFVGDWEQTAAYNLDQVLEQGGVSSLLQNLAVSVTPIQRIVRSGENALKIDIHVIIPYEGLSADQMAQIEEVFKVVYPVDDHHFKVILPYGTLVIDGVTPNMLNYFGRPYEGIAVFDGKKITVTGTLWNGNKIIDERLITPDGSMLFRVTINSGSGHHHHHH

SEQ ID NO: 3614 - protein, 457 aa, Synthetic construct
MFHYVDVGPRDGTPVLFLHGNPTSSYVWRNIIPHVAPTHRCIAPDLIGMGKSDKPDLGYFFDDHVRFMDAFIEALGLEEVVLVIHDWGSALGFHWAKRNPERVKGIAFMEFIRPVPTWDEWPEFARETFQAFRTTDVGRKLIIDQNVFIEGTLRMGVVRPLTEVEMDHYREPFLNPVDREPLWRFPNELPIAGEPANIVALVEEYMDWLHQSPVPKLLFWGTPGVLIPPAEAARLAKSLPNCKAVDIGPGLNLLQEDNPDLIGSEIARWLSTLEISGGSGGSGGGGSGGMVFTLEDFVGDWEQTAAYNLDQVLEQGGVSSLLQNLAVSVTPIQRIVRSGENALKIDIHVIIPYEGLSADQMAQIEEVFKVVYPVDDHHFKVILPYGTLVIDGVTPNMLNYFGRPYEGIAVFDGKKITVTGTLWNGNKIIDERLITPDGSMLFRVTINSGSGHHHHHH

SEQ ID NO: 3615 - protein, 457 aa, Synthetic construct
MFHYVDVGPRDGTPVLFLHGNPTSSYVWRNIIPHVAPTHRCIAPDLIGMGKSDKPDLGYFFDDHVRFMDAFIEALGLEEVVLVIHDWGSALGFHWAKRNPERVKGIAFMEFIRPVPTWDEWPEFARETFQAFRTTDVGRKLIIDQNVFIEGTLPMGVVRPLTEVEMDHYREPFLNAVDREPLWRFPNELPIAGEPANIVALVEEYMDWLHQSPVPKLLFWGTPGVLIPPAEAARLAKSLPNCKAVDIGPGLNLLQEDNPDLIGSEIARWLSTLEISGGSGGSGGGGSGGMVFTLEDFVGDWEQTAAYNLDQVLEQGGVSSLLQNLAVSVTPIQRIVRSGENALKIDIHVIIPYEGLSADQMAQIEEVFKVVYPVDDHHFKVILPYGTLVIDGVTPNMLNYFGRPYEGIAVFDGKKITVTGTLWNGNKIIDERLITPDGSMLFRVTINSGSGHHHHHH

SEQ ID NO: 3616 - protein, 457 aa, Synthetic construct
MFHYVDVGPRDGTPVLFLHGNPTSSYVWRNIIPHVAPTHRCIAPDLIGMGKSDKPDLGYFFDDHVRFMDAFIEALGLEEVVLVIHDWGSALGFHWAKRNPERVKGIAFMEFIRPVPTWDEWPEFARETFQAFRTTDVGRKLIIDQNVFIEGTLPMGVVRPLTEVEMDHYREPFLNPVDREPLWRWPNELPIAGEPANIVALVEEYMDWLHQSPVPKLLFWGTPGVLIPPAEAARLAKSLPNCKAVDIGPGLNLLQEDNPDLIGSEIARWLSTLEISGGSGGSGGGGSGGMVFTLEDFVGDWEQTAAYNLDQVLEQGGVSSLLQNLAVSVTPIQRIVRSGENALKIDIHVIIPYEGLSADQMAQIEEVFKVVYPVDDHHFKVILPYGTLVIDGVTPNMLNYFGRPYEGIAVFDGKKITVTGTLWNGNKIIDERLITPDGSMLFRVTINSGSGHHHHHH

SEQ ID NO: 3617 - protein, 457 aa, Synthetic construct
MFHYVDVGPRDGTPVLFLHGNPTSSYVWRNIIPHVAPTHRCIAPDLIGMGKSDKPDLGYFFDDHVRFMDAFIEALGLEEVVLVIHDWGSALGFHWAKRNPERVKGIAFMEFIRPVPTWDEWPEFARETFQAFRTTDVGRKLIIDQNVFIEGTLPMGVVRPLTEVEMDHYREPFLNPVDREPLWRFPNELPIGGEPANIVALVEEYMDWLHQSPVPKLLFWGTPGVLIPPAEAARLAKSLPNCKAVDIGPGLNLLQEDNPDLIGSEIARWLSTLEISGGSGGSGGGGSGGMVFTLEDFVGDWEQTAAYNLDQVLEQGGVSSLLQNLAVSVTPIQRIVRSGENALKIDIHVIIPYEGLSADQMAQIEEVFKVVYPVDDHHFKVILPYGTLVIDGVTPNMLNYFGRPYEGIAVFDGKKITVTGTLWNGNKIIDERLITPDGSMLFRVTINSGSGHHHHHH

SEQ ID NO: 3618 - protein, 457 aa, Synthetic construct
MFHYVDVGPRDGTPVLFLHGNPTSSYVWRNIIPHVAPTHRCIAPDLIGMGKSDKPDLGYFFDDHVRFMDAFIEALGLEEVVLVIHDWGSALGFHWAKRNPERVKGIAFMEFIRPVPTWDEWPEFARETFQAFRTTDVGRKLIIDQNVFIEGTLPMGVVRPLTEVEMDHYREPFLNPVDREPLWRFPNELPIAGEPANIVALAEEYMDWLHQSPVPKLLFWGTPGVLIPPAEAARLAKSLPNCKAVDIGPGLNLLQEDNPDLIGSEIARWLSTLEISGGSGGSGGGGSGGMVFTLEDFVGDWEQTAAYNLDQVLEQGGVSSLLQNLAVSVTPIQRIVRSGENALKIDIHVIIPYEGLSADQMAQIEEVFKVVYPVDDHHFKVILPYGTLVIDGVTPNMLNYFGRPYEGIAVFDGKKITVTGTLWNGNKIIDERLITPDGSMLFRVTINSGSGHHHHHH

SEQ ID NO: 3619 - protein, 457 aa, Synthetic construct; identical to SEQ ID NO: 3576

SEQ ID NO: 3620 - protein, 457 aa, Synthetic construct; identical to SEQ ID NO: 3591

SEQ ID NO: 3621 - protein, 457 aa, Synthetic construct; identical to SEQ ID NO: 3606

SEQ ID NO: 3622 - protein, 457 aa, Synthetic construct
MFHYVDVGPRDGTPVLFLHGNPTSSYVWRNIIPHVAPTHRCIAPDLIGMGKSDKPDLGYFFDDHVRFMDAFIEALGLEEVVLVIHDWGSALGFHWAKRNPERVKGIAFMEFIRPIGDWDEWPEFARETFQAFRTTDVGRKLIIDQNVFIEGTLPMGVVRPLTEVEMDHYREPFLNPVDREPLWRFPNELPIAGEPANIVALVEEYMDWLHQSPVPKLLFWGTPGVLIPPAEAARLAKSLPNCKAVDIGPGLNLLQEDNPDLIGSEIARWLSTLEISGGSGGSGGGGSGGMVFTLEDFVGDWEQTAAYNLDQVLEQGGVSSLLQNLAVSVTPIQRIVRSGENALKIDIHVIIPYEGLSADQMAQIEEVFKVVYPVDDHHFKVILPYGTLVIDGVTPNMLNYFGRPYEGIAVFDGKKITVTGTLWNGNKIIDERLITPDGSMLFRVTINSGSGHHHHHH

SEQ ID NO: 3623 - protein, 457 aa, Synthetic construct
MFHYVDVGPRDGTPVLFLHGNPTSSYVWRNIIPHVAPTHRCIAPDLIGMGKSDKPDLGYFFDDHVRFMDAFIEALGLEEVVLVIHDWGSALGFHWAKRNPERVKGIAFMEFIRPIGTWDEWPEFARKTFQAFRTTDVGRKLIIDQNVFIEGTLPMGVVRPLTEVEMDHYREPFLNPVDREPLWRFPNELPIAGEPANIVALVEEYMDWLHQSPVPKLLFWGTPGVLIPPAEAARLAKSLPNCKAVDIGPGLNLLQEDNPDLIGSEIARWLSTLEISGGSGGSGGGGSGGMVFTLEDFVGDWEQTAAYNLDQVLEQGGVSSLLQNLAVSVTPIQRIVRSGENALKIDIHVIIPYEGLSADQMAQIEEVFKVVYPVDDHHFKVILPYGTLVIDGVTPNMLNYFGRPYEGIAVFDGKKITVTGTLWNGNKIIDERLITPDGSMLFRVTINSGSGHHHHHH

SEQ ID NO: 3624 - protein, 457 aa, Synthetic construct
MFHYVDVGPRDGTPVLFLHGNPTSSYVWRNIIPHVAPTHRCIAPDLIGMGKSDKPDLGYFFDDHVRFMDAFIEALGLEEVVLVIHDWGSALGFHWAKRNPERVKGIAFMEFIRPIGTWDEWPEFARETFRAFRTTDVGRKLIIDQNVFIEGTLPMGVVRPLTEVEMDHYREPFLNPVDREPLWRFPNELPIAGEPANIVALVEEYMDWLHQSPVPKLLFWGTPGVLIPPAEAARLAKSLPNCKAVDIGPGLNLLQEDNPDLIGSEIARWLSTLEISGGSGGSGGGGSGGMVFTLEDFVGDWEQTAAYNLDQVLEQGGVSSLLQNLAVSVTPIQRIVRSGENALKIDIHVIIPYEGLSADQMAQIEEVFKVVYPVDDHHFKVILPYGTLVIDGVTPNMLNYFGRPYEGIAVFDGKKITVTGTLWNGNKIIDERLITPDGSMLFRVTINSGSGHHHHHH

SEQ ID NO: 3625 - protein, 457 aa, Synthetic construct
MFHYVDVGPRDGTPVLFLHGNPTSSYVWRNIIPHVAPTHRCIAPDLIGMGKSDKPDLGYFFDDHVRFMDAFIEALGLEEVVLVIHDWGSALGFHWAKRNPERVKGIAFMEFIRPIGTWDEWPEFARETFQRFRTTDVGRKLIIDQNVFIEGTLPMGVVRPLTEVEMDHYREPFLNPVDREPLWRFPNELPIAGEPANIVALVEEYMDWLHQSPVPKLLFWGTPGVLIPPAEAARLAKSLPNCKAVDIGPGLNLLQEDNPDLIGSEIARWLSTLEISGGSGGSGGGGSGGMVFTLEDFVGDWEQTAAYNLDQVLEQGGVSSLLQNLAVSVTPIQRIVRSGENALKIDIHVIIPYEGLSADQMAQIEEVFKVVYPVDDHHFKVILPYGTLVIDGVTPNMLNYFGRPYEGIAVFDGKKITVTGTLWNGNKIIDERLITPDGSMLFRVTINSGSGHHHHHH

SEQ ID NO: 3626 - protein, 457 aa, Synthetic construct
MFHYVDVGPRDGTPVLFLHGNPTSSYVWRNIIPHVAPTHRCIAPDLIGMGKSDKPDLGYFFDDHVRFMDAFIEALGLEEVVLVIHDWGSALGFHWAKRNPERVKGIAFMEFIRPIGTWDEWPEFARETFQAFRTTDVGRELIIDQNVFIEGTLPMGVVRPLTEVEMDHYREPFLNPVDREPLWRFPNELPIAGEPANIVALVEEYMDWLHQSPVPKLLFWGTPGVLIPPAEAARLAKSLPNCKAVDIGPGLNLLQEDNPDLIGSEIARWLSTLEISGGSGGSGGGGSGGMVFTLEDFVGDWEQTAAYNLDQVLEQGGVSSLLQNLAVSVTPIQRIVRSGENALKIDIHVIIPYEGLSADQMAQIEEVFKVVYPVDDHHFKVILPYGTLVIDGVTPNMLNYFGRPYEGIAVFDGKKITVTGTLWNGNKIIDERLITPDGSMLFRVTINSGSGHHHHHH

SEQ ID NO: 3627 - protein, 457 aa, Synthetic construct
MFHYVDVGPRDGTPVLFLHGNPTSSYVWRNIIPHVAPTHRCIAPDLIGMGKSDKPDLGYFFDDHVRFMDAFIEALGLEEVVLVIHDWGSALGFHWAKRNPERVKGIAFMEFIRPIGTWDEWPEFARETFQAFRTTDVGRKLIIDQNVIIEGTLPMGVVRPLTEVEMDHYREPFLNPVDREPLWRFPNELPIAGEPANIVALVEEYMDWLHQSPVPKLLFWGTPGVLIPPAEAARLAKSLPNCKAVDIGPGLNLLQEDNPDLIGSEIARWLSTLEISGGSGGSGGGGSGGMVFTLEDFVGDWEQTAAYNLDQVLEQGGVSSLLQNLAVSVTPIQRIVRSGENALKIDIHVIIPYEGLSADQMAQIEEVFKVVYPVDDHHFKVILPYGTLVIDGVTPNMLNYFGRPYEGIAVFDGKKITVTGTLWNGNKIIDERLITPDGSMLFRVTINSGSGHHHHHH

SEQ ID NO: 3628 - protein, 457 aa, Synthetic construct
MFHYVDVGPRDGTPVLFLHGNPTSSYVWRNIIPHVAPTHRCIAPDLIGMGKSDKPDLGYFFDDHVRFMDAFIEALGLEEVVLVIHDWGSALGFHWAKRNPERVKGIAFMEFIRPIGTWDEWPEFARETFQAFRTTDVGRKLIIDQNVLIEGTLPMGVVRPLTEVEMDHYREPFLNPVDREPLWRFPNELPIAGEPANIVALVEEYMDWLHQSPVPKLLFWGTPGVLIPPAEAARLAKSLPNCKAVDIGPGLNLLQEDNPDLIGSEIARWLSTLEISGGSGGSGGGGSGGMVFTLEDFVGDWEQTAAYNLDQVLEQGGVSSLLQNLAVSVTPIQRIVRSGENALKIDIHVIIPYEGLSADQMAQIEEVFKVVYPVDDHHFKVILPYGTLVIDGVTPNMLNYFGRPYEGIAVFDGKKITVTGTLWNGNKIIDERLITPDGSMLFRVTINSGSGHHHHHH

SEQ ID NO: 3629 - protein, 457 aa, Synthetic construct
MFHYVDVGPRDGTPVLFLHGNPTSSYVWRNIIPHVAPTHRCIAPDLIGMGKSDKPDLGYFFDDHVRFMDAFIEALGLEEVVLVIHDWGSALGFHWAKRNPERVKGIAFMEFIRPIGTWDEWPEFARETFQAFRTTDVGRKLIIDQNVFIEGTLRMGVVRPLTEVEMDHYREPFLNPVDREPLWRFPNELPIAGEPANIVALVEEYMDWLHQSPVPKLLFWGTPGVLIPPAEAARLAKSLPNCKAVDIGPGLNLLQEDNPDLIGSEIARWLSTLEISGGSGGSGGGGSGGMVFTLEDFVGDWEQTAAYNLDQVLEQGGVSSLLQNLAVSVTPIQRIVRSGENALKIDIHVIIPYEGLSADQMAQIEEVFKVVYPVDDHHFKVILPYGTLVIDGVTPNMLNYFGRPYEGIAVFDGKKITVTGTLWNGNKIIDERLITPDGSMLFRVTINSGSGHHHHHH

SEQ ID NO: 3630 - protein, 457 aa, Synthetic construct
MFHYVDVGPRDGTPVLFLHGNPTSSYVWRNIIPHVAPTHRCIAPDLIGMGKSDKPDLGYFFDDHVRFMDAFIEALGLEEVVLVIHDWGSALGFHWAKRNPERVKGIAFMEFIRPIGTWDEWPEFARETFQAFRTTDVGRKLIIDQNVFIEGTLPMGVVRPLTEVEMDHYREPFLNAVDREPLWRFPNELPIAGEPANIVALVEEYMDWLHQSPVPKLLFWGTPGVLIPPAEAARLAKSLPNCKAVDIGPGLNLLQEDNPDLIGSEIARWLSTLEISGGSGGSGGGGSGGMVFTLEDFVGDWEQTAAYNLDQVLEQGGVSSLLQNLAVSVTPIQRIVRSGENALKIDIHVIIPYEGLSADQMAQIEEVFKVVYPVDDHHFKVILPYGTLVIDGVTPNMLNYFGRPYEGIAVFDGKKITVTGTLWNGNKIIDERLITPDGSMLFRVTINSGSGHHHHHH

SEQ ID NO: 3631 - protein, 457 aa, Synthetic construct
MFHYVDVGPRDGTPVLFLHGNPTSSYVWRNIIPHVAPTHRCIAPDLIGMGKSDKPDLGYFFDDHVRFMDAFIEALGLEEVVLVIHDWGSALGFHWAKRNPERVKGIAFMEFIRPIGTWDEWPEFARETFQAFRTTDVGRKLIIDQNVFIEGTLPMGVVRPLTEVEMDHYREPFLNPVDREPLWRWPNELPIAGEPANIVALVEEYMDWLHQSPVPKLLFWGTPGVLIPPAEAARLAKSLPNCKAVDIGPGLNLLQEDNPDLIGSEIARWLSTLEISGGSGGSGGGGSGGMVFTLEDFVGDWEQTAAYNLDQVLEQGGVSSLLQNLAVSVTPIQRIVRSGENALKIDIHVIIPYEGLSADQMAQIEEVFKVVYPVDDHHFKVILPYGTLVIDGVTPNMLNYFGRPYEGIAVFDGKKITVTGTLWNGNKIIDERLITPDGSMLFRVTINSGSGHHHHHH

SEQ ID NO: 3632 - protein, 457 aa, Synthetic construct
MFHYVDVGPRDGTPVLFLHGNPTSSYVWRNIIPHVAPTHRCIAPDLIGMGKSDKPDLGYFFDDHVRFMDAFIEALGLEEVVLVIHDWGSALGFHWAKRNPERVKGIAFMEFIRPIGTWDEWPEFARETFQAFRTTDVGRKLIIDQNVFIEGTLPMGVVRPLTEVEMDHYREPFLNPVDREPLWRFPNELPIGGEPANIVALVEEYMDWLHQSPVPKLLFWGTPGVLIPPAEAARLAKSLPNCKAVDIGPGLNLLQEDNPDLIGSEIARWLSTLEISGGSGGSGGGGSGGMVFTLEDFVGDWEQTAAYNLDQVLEQGGVSSLLQNLAVSVTPIQRIVRSGENALKIDIHVIIPYEGLSADQMAQIEEVFKVVYPVDDHHFKVILPYGTLVIDGVTPNMLNYFGRPYEGIAVFDGKKITVTGTLWNGNKIIDERLITPDGSMLFRVTINSGSGHHHHHH

SEQ ID NO: 3633 - protein, 457 aa, Synthetic construct
MFHYVDVGPRDGTPVLFLHGNPTSSYVWRNIIPHVAPTHRCIAPDLIGMGKSDKPDLGYFFDDHVRFMDAFIEALGLEEVVLVIHDWGSALGFHWAKRNPERVKGIAFMEFIRPIGTWDEWPEFARETFQAFRTTDVGRKLIIDQNVFIEGTLPMGVVRPLTEVEMDHYREPFLNPVDREPLWRFPNELPIAGEPANIVALAEEYMDWLHQSPVPKLLFWGTPGVLIPPAEAARLAKSLPNCKAVDIGPGLNLLQEDNPDLIGSEIARWLSTLEISGGSGGSGGGGSGGMVFTLEDFVGDWEQTAAYNLDQVLEQGGVSSLLQNLAVSVTPIQRIVRSGENALKIDIHVIIPYEGLSADQMAQIEEVFKVVYPVDDHHFKVILPYGTLVIDGVTPNMLNYFGRPYEGIAVFDGKKITVTGTLWNGNKIIDERLITPDGSMLFRVTINSGSGHHHHHH

SEQ ID NO: 3634 - protein, 457 aa, Synthetic construct; identical to SEQ ID NO: 3577

SEQ ID NO: 3635 - protein, 457 aa, Synthetic construct; identical to SEQ ID NO: 3592

SEQ ID NO: 3636 - protein, 457 aa, Synthetic construct; identical to SEQ ID NO: 3607

SEQ ID NO: 3637 - protein, 457 aa, Synthetic construct; identical to SEQ ID NO: 3622

SEQ ID NO: 3638 - protein, 457 aa, Synthetic construct
MFHYVDVGPRDGTPVLFLHGNPTSSYVWRNIIPHVAPTHRCIAPDLIGMGKSDKPDLGYFFDDHVRFMDAFIEALGLEEVVLVIHDWGSALGFHWAKRNPERVKGIAFMEFIRPIPDWDEWPEFARKTFQAFRTTDVGRKLIIDQNVFIEGTLPMGVVRPLTEVEMDHYREPFLNPVDREPLWRFPNELPIAGEPANIVALVEEYMDWLHQSPVPKLLFWGTPGVLIPPAEAARLAKSLPNCKAVDIGPGLNLLQEDNPDLIGSEIARWLSTLEISGGSGGSGGGGSGGMVFTLEDFVGDWEQTAAYNLDQVLEQGGVSSLLQNLAVSVTPIQRIVRSGENALKIDIHVIIPYEGLSADQMAQIEEVFKVVYPVDDHHFKVILPYGTLVIDGVTPNMLNYFGRPYEGIAVFDGKKITVTGTLWNGNKIIDERLITPDGSMLFRVTINSGSGHHHHHH

SEQ ID NO: 3639 - protein, 457 aa, Synthetic construct
MFHYVDVGPRDGTPVLFLHGNPTSSYVWRNIIPHVAPTHRCIAPDLIGMGKSDKPDLGYFFDDHVRFMDAFIEALGLEEVVLVIHDWGSALGFHWAKRNPERVKGIAFMEFIRPIPDWDEWPEFARETFRAFRTTDVGRKLIIDQNVFIEGTLPMGVVRPLTEVEMDHYREPFLNPVDREPLWRFPNELPIAGEPANIVALVEEYMDWLHQSPVPKLLFWGTPGVLIPPAEAARLAKSLPNCKAVDIGPGLNLLQEDNPDLIGSEIARWLSTLEISGGSGGSGGGGSGGMVFTLEDFVGDWEQTAAYNLDQVLEQGGVSSLLQNLAVSVTPIQRIVRSGENALKIDIHVIIPYEGLSADQMAQIEEVFKVVYPVDDHHFKVILPYGTLVIDGVTPNMLNYFGRPYEGIAVFDGKKITVTGTLWNGNKIIDERLITPDGSMLFRVTINSGSGHHHHHH

SEQ ID NO: 3640 - protein, 457 aa, Synthetic construct
MFHYVDVGPRDGTPVLFLHGNPTSSYVWRNIIPHVAPTHRCIAPDLIGMGKSDKPDLGYFFDDHVRFMDAFIEALGLEEVVLVIHDWGSALGFHWAKRNPERVKGIAFMEFIRPIPDWDEWPEFARETFQRFRTTDVGRKLIIDQNVFIEGTLPMGVVRPLTEVEMDHYREPFLNPVDREPLWRFPNELPIAGEPANIVALVEEYMDWLHQSPVPKLLFWGTPGVLIPPAEAARLAKSLPNCKAVDIGPGLNLLQEDNPDLIGSEIARWLSTLEISGGSGGSGGGGSGGMVFTLEDFVGDWEQTAAYNLDQVLEQGGVSSLLQNLAVSVTPIQRIVRSGENALKIDIHVIIPYEGLSADQMAQIEEVFKVVYPVDDHHFKVILPYGTLVIDGVTPNMLNYFGRPYEGIAVFDGKKITVTGTLWNGNKIIDERLITPDGSMLFRVTINSGSGHHHHHH

SEQ ID NO: 3641 - protein, 457 aa, Synthetic construct
MFHYVDVGPRDGTPVLFLHGNPTSSYVWRNIIPHVAPTHRCIAPDLIGMGKSDKPDLGYFFDDHVRFMDAFIEALGLEEVVLVIHDWGSALGFHWAKRNPERVKGIAFMEFIRPIPDWDEWPEFARETFQAFRTTDVGRELIIDQNVFIEGTLPMGVVRPLTEVEMDHYREPFLNPVDREPLWRFPNELPIAGEPANIVALVEEYMDWLHQSPVPKLLFWGTPGVLIPPAEAARLAKSLPNCKAVDIGPGLNLLQEDNPDLIGSEIARWLSTLEISGGSGGSGGGGSGGMVFTLEDFVGDWEQTAAYNLDQVLEQGGVSSLLQNLAVSVTPIQRIVRSGENALKIDIHVIIPYEGLSADQMAQIEEVFKVVYPVDDHHFKVILPYGTLVIDGVTPNMLNYFGRPYEGIAVFDGKKITVTGTLWNGNKIIDERLITPDGSMLFRVTINSGSGHHHHHH

SEQ ID NO: 3642 - protein, 457 aa, Synthetic construct
MLHYVDVGPRDGTPVLFLHGNPTSSYVWRNIIPHVAPTHRCIAPDLIGMGKSGKPDLGYFFDDHVRFMDAFIEALGLEEVVLVIHDWGSALGFHWAKRNPERVKGIAFMEFVRPIPTWDEWPEFARETFQAFRTTDVGRKLIIDQNVFIEGTLPMGVVRPLTEVEMDHYREPFLNPVDREPLWRFPNELPIAGEPANIVALVEEYMDWLHQSPVPKLLFWGTPGVLIPPAEAARLAKSLPNCKAVDIGPGLNLLQEDNPDLIGSEIARWLSTLEISGGSGGSGGGGSGGMVFTLEDFVGDWEQTAAYNLDQVLEQGGVSSLLQNLAVSVTPIQRIVRSGENALKIDIHVIIPYEGLSADQMAQIEEVFKVVYPVDDHHFKVILPYGTLVIDGVTPNMLNYFGRPYEGIAVFDGKKITVTGTLWNGNKIIDERLITPDGSMLFRVTINSGSGHHHHHH

SEQ ID NO: 3643 - protein, 457 aa, Synthetic construct
MLHYVDVGPRDGTPVLFLHGNPTSSYVWRNIIPHVAPTHRCIAPDLIGMGKSGKPDLGYFFDDHVRFMDAFIEALGLEEVVLVIHDWGSALGFHWAKRNPERVKGIAFMEFIRTIPTWDEWPEFARETFQAFRTTDVGRKLIIDQNVFIEGTLPMGVVRPLTEVEMDHYREPFLNPVDREPLWRFPNELPIAGEPANIVALVEEYMDWLHQSPVPKLLFWGTPGVLIPPAEAARLAKSLPNCKAVDIGPGLNLLQEDNPDLIGSEIARWLSTLEISGGSGGSGGGGSGGMVFTLEDFVGDWEQTAAYNLDQVLEQGGVSSLLQNLAVSVTPIQRIVRSGENALKIDIHVIIPYEGLSADQMAQIEEVFKVVYPVDDHHFKVILPYGTLVIDGVTPNMLNYFGRPYEGIAVFDGKKITVTGTLWNGNKIIDERLITPDGSMLFRVTINSGSGHHHHHH

SEQ ID NO: 3644 - protein, 457 aa, Synthetic construct
MLHYVDVGPRDGTPVLFLHGNPTSSYVWRNIIPHVAPTHRCIAPDLIGMGKSGKPDLGYFFDDHVRFMDAFIEALGLEEVVLVIHDWGSALGFHWAKRNPERVKGIAFMEFIRPVPTWDEWPEFARETFQAFRTTDVGRKLIIDQNVFIEGTLPMGVVRPLTEVEMDHYREPFLNPVDREPLWRFPNELPIAGEPANIVALVEEYMDWLHQSPVPKLLFWGTPGVLIPPAEAARLAKSLPNCKAVDIGPGLNLLQEDNPDLIGSEIARWLSTLEISGGSGGSGGGGSGGMVFTLEDFVGDWEQTAAYNLDQVLEQGGVSSLLQNLAVSVTPIQRIVRSGENALKIDIHVIIPYEGLSADQMAQIEEVFKVVYPVDDHHFKVILPYGTLVIDGVTPNMLNYFGRPYEGIAVFDGKKITVTGTLWNGNKIIDERLITPDGSMLFRVTINSGSGHHHHHH

SEQ ID NO: 3645 - protein, 457 aa, Synthetic construct
MLHYVDVGPRDGTPVLFLHGNPTSSYVWRNIIPHVAPTHRCIAPDLIGMGKSGKPDLGYFFDDHVRFMDAFIEALGLEEVVLVIHDWGSALGFHWAKRNPERVKGIAFMEFIRPIGTWDEWPEFARETFQAFRTTDVGRKLIIDQNVFIEGTLPMGVVRPLTEVEMDHYREPFLNPVDREPLWRFPNELPIAGEPANIVALVEEYMDWLHQSPVPKLLFWGTPGVLIPPAEAARLAKSLPNCKAVDIGPGLNLLQEDNPDLIGSEIARWLSTLEISGGSGGSGGGGSGGMVFTLEDFVGDWEQTAAYNLDQVLEQGGVSSLLQNLAVSVTPIQRIVRSGENALKIDIHVIIPYEGLSADQMAQIEEVFKVVYPVDDHHFKVILPYGTLVIDGVTPNMLNYFGRPYEGIAVFDGKKITVTGTLWNGNKIIDERLITPDGSMLFRVTINSGSGHHHHHH

SEQ ID NO: 3646 - protein, 457 aa, Synthetic construct
MLHYVDVGPRDGTPVLFLHGNPTSSYVWRNIIPHVAPTHRCIAPDLIGMGKSGKPDLGYFFDDHVRFMDAFIEALGLEEVVLVIHDWGSALGFHWAKRNPERVKGIAFMEFIRPIPDWDEWPEFARETFQAFRTTDVGRKLIIDQNVFIEGTLPMGVVRPLTEVEMDHYREPFLNPVDREPLWRFPNELPIAGEPANIVALVEEYMDWLHQSPVPKLLFWGTPGVLIPPAEAARLAKSLPNCKAVDIGPGLNLLQEDNPDLIGSEIARWLSTLEISGGSGGSGGGGSGGMVFTLEDFVGDWEQTAAYNLDQVLEQGGVSSLLQNLAVSVTPIQRIVRSGENALKIDIHVIIPYEGLSADQMAQIEEVFKVVYPVDDHHFKVILPYGTLVIDGVTPNMLNYFGRPYEGIAVFDGKKITVTGTLWNGNKIIDERLITPDGSMLFRVTINSGSGHHHHHH

SEQ ID NO: 3647 - protein, 457 aa, Synthetic construct
MLHYVDVGPRDGTPVLFLHGNPTSSYVWRNIIPHVAPTHRCIAPDLIGMGKSGKPDLGYFFDDHVRFMDAFIEALGLEEVVLVIHDWGSALGFHWAKRNPERVKGIAFMEFIRPIPTWDEWPEFARKTFQAFRTTDVGRKLIIDQNVFIEGTLPMGVVRPLTEVEMDHYREPFLNPVDREPLWRFPNELPIAGEPANIVALVEEYMDWLHQSPVPKLLFWGTPGVLIPPAEAARLAKSLPNCKAVDIGPGLNLLQEDNPDLIGSEIARWLSTLEISGGSGGSGGGGSGGMVFTLEDFVGDWEQTAAYNLDQVLEQGGVSSLLQNLAVSVTPIQRIVRSGENALKIDIHVIIPYEGLSADQMAQIEEVFKVVYPVDDHHFKVILPYGTLVIDGVTPNMLNYFGRPYEGIAVFDGKKITVTGTLWNGNKIIDERLITPDGSMLFRVTINSGSGHHHHHH

SEQ ID NO: 3648 - protein, 457 aa, Synthetic construct
MLHYVDVGPRDGTPVLFLHGNPTSSYVWRNIIPHVAPTHRCIAPDLIGMGKSGKPDLGYFFDDHVRFMDAFIEALGLEEVVLVIHDWGSALGFHWAKRNPERVKGIAFMEFIRPIPTWDEWPEFARETFRAFRTTDVGRKLIIDQNVFIEGTLPMGVVRPLTEVEMDHYREPFLNPVDREPLWRFPNELPIAGEPANIVALVEEYMDWLHQSPVPKLLFWGTPGVLIPPAEAARLAKSLPNCKAVDIGPGLNLLQEDNPDLIGSEIARWLSTLEISGGSGGSGGGGSGGMVFTLEDFVGDWEQTAAYNLDQVLEQGGVSSLLQNLAVSVTPIQRIVRSGENALKIDIHVIIPYEGLSADQMAQIEEVFKVVYPVDDHHFKVILPYGTLVIDGVTPNMLNYFGRPYEGIAVFDGKKITVTGTLWNGNKIIDERLITPDGSMLFRVTINSGSGHHHHHH

SEQ ID NO: 3649 - protein, 457 aa, Synthetic construct
MLHYVDVGPRDGTPVLFLHGNPTSSYVWRNIIPHVAPTHRCIAPDLIGMGKSGKPDLGYFFDDHVRFMDAFIEALGLEEVVLVIHDWGSALGFHWAKRNPERVKGIAFMEFIRPIPTWDEWPEFARETFQRFRTTDVGRKLIIDQNVFIEGTLPMGVVRPLTEVEMDHYREPFLNPVDREPLWRFPNELPIAGEPANIVALVEEYMDWLHQSPVPKLLFWGTPGVLIPPAEAARLAKSLPNCKAVDIGPGLNLLQEDNPDLIGSEIARWLSTLEISGGSGGSGGGGSGGMVFTLEDFVGDWEQTAAYNLDQVLEQGGVSSLLQNLAVSVTPIQRIVRSGENALKIDIHVIIPYEGLSADQMAQIEEVFKVVYPVDDHHFKVILPYGTLVIDGVTPNMLNYFGRPYEGIAVFDGKKITVTGTLWNGNKIIDERLITPDGSMLFRVTINSGSGHHHHHH

SEQ ID NO: 3650 - protein, 457 aa, Synthetic construct
MLHYVDVGPRDGTPVLFLHGNPTSSYVWRNIIPHVAPTHRCIAPDLIGMGKSGKPDLGYFFDDHVRFMDAFIEALGLEEVVLVIHDWGSALGFHWAKRNPERVKGIAFMEFIRPIPTWDEWPEFARETFQAFRTTDVGRELIIDQNVFIEGTLPMGVVRPLTEVEMDHYREPFLNPVDREPLWRFPNELPIAGEPANIVALVEEYMDWLHQSPVPKLLFWGTPGVLIPPAEAARLAKSLPNCKAVDIGPGLNLLQEDNPDLIGSEIARWLSTLEISGGSGGSGGGGSGGMVFTLEDFVGDWEQTAAYNLDQVLEQGGVSSLLQNLAVSVTPIQRIVRSGENALKIDIHVIIPYEGLSADQMAQIEEVFKVVYPVDDHHFKVILPYGTLVIDGVTPNMLNYFGRPYEGIAVFDGKKITVTGTLWNGNKIIDERLITPDGSMLFRVTINSGSGHHHHHH

SEQ ID NO: 3651 - protein, 457 aa, Synthetic construct
MLHYVDVGPRDGTPVLFLHGNPTSSYVWRNIIPHVAPTHRCIAPDLIGMGKSGKPDLGYFFDDHVRFMDAFIEALGLEEVVLVIHDWGSALGFHWAKRNPERVKGIAFMEFIRPIPTWDEWPEFARETFQAFRTTDVGRKLIIDQNVIIEGTLPMGVVRPLTEVEMDHYREPFLNPVDREPLWRFPNELPIAGEPANIVALVEEYMDWLHQSPVPKLLFWGTPGVLIPPAEAARLAKSLPNCKAVDIGPGLNLLQEDNPDLIGSEIARWLSTLEISGGSGGSGGGGSGGMVFTLEDFVGDWEQTAAYNLDQVLEQGGVSSLLQNLAVSVTPIQRIVRSGENALKIDIHVIIPYEGLSADQMAQIEEVFKVVYPVDDHHFKVILPYGTLVIDGVTPNMLNYFGRPYEGIAVFDGKKITVTGTLWNGNKIIDERLITPDGSMLFRVTINSGSGHHHHHH

SEQ ID NO: 3652 - protein, 457 aa, Synthetic construct
MLHYVDVGPRDGTPVLFLHGNPTSSYVWRNIIPHVAPTHRCIAPDLIGMGKSGKPDLGYFFDDHVRFMDAFIEALGLEEVVLVIHDWGSALGFHWAKRNPERVKGIAFMEFIRPIPTWDEWPEFARETFQAFRTTDVGRKLIIDQNVLIEGTLPMGVVRPLTEVEMDHYREPFLNPVDREPLWRFPNELPIAGEPANIVALVEEYMDWLHQSPVPKLLFWGTPGVLIPPAEAARLAKSLPNCKAVDIGPGLNLLQEDNPDLIGSEIARWLSTLEISGGSGGSGGGGSGGMVFTLEDFVGDWEQTAAYNLDQVLEQGGVSSLLQNLAVSVTPIQRIVRSGENALKIDIHVIIPYEGLSADQMAQIEEVFKVVYPVDDHHFKVILPYGTLVIDGVTPNMLNYFGRPYEGIAVFDGKKITVTGTLWNGNKIIDERLITPDGSMLFRVTINSGSGHHHHHH

SEQ ID NO: 3653 - protein, 457 aa, Synthetic construct
MLHYVDVGPRDGTPVLFLHGNPTSSYVWRNIIPHVAPTHRCIAPDLIGMGKSGKPDLGYFFDDHVRFMDAFIEALGLEEVVLVIHDWGSALGFHWAKRNPERVKGIAFMEFIRPIPTWDEWPEFARETFQAFRTTDVGRKLIIDQNVFIEGTLRMGVVRPLTEVEMDHYREPFLNPVDREPLWRFPNELPIAGEPANIVALVEEYMDWLHQSPVPKLLFWGTPGVLIPPAEAARLAKSLPNCKAVDIGPGLNLLQEDNPDLIGSEIARWLSTLEISGGSGGSGGGGSGGMVFTLEDFVGDWEQTAAYNLDQVLEQGGVSSLLQNLAVSVTPIQRIVRSGENALKIDIHVIIPYEGLSADQMAQIEEVFKVVYPVDDHHFKVILPYGTLVIDGVTPNMLNYFGRPYEGIAVFDGKKITVTGTLWNGNKIIDERLITPDGSMLFRVTINSGSGHHHHHH

SEQ ID NO: 3654 - protein, 457 aa, Synthetic construct
MLHYVDVGPRDGTPVLFLHGNPTSSYVWRNIIPHVAPTHRCIAPDLIGMGKSGKPDLGYFFDDHVRFMDAFIEALGLEEVVLVIHDWGSALGFHWAKRNPERVKGIAFMEFIRPIPTWDEWPEFARETFQAFRTTDVGRKLIIDQNVFIEGTLPMGVVRPLTEVEMDHYREPFLNAVDREPLWRFPNELPIAGEPANIVALVEEYMDWLHQSPVPKLLFWGTPGVLIPPAEAARLAKSLPNCKAVDIGPGLNLLQEDNPDLIGSEIARWLSTLEISGGSGGSGGGGSGGMVFTLEDFVGDWEQTAAYNLDQVLEQGGVSSLLQNLAVSVTPIQRIVRSGENALKIDIHVIIPYEGLSADQMAQIEEVFKVVYPVDDHHFKVILPYGTLVIDGVTPNMLNYFGRPYEGIAVFDGKKITVTGTLWNGNKIIDERLITPDGSMLFRVTINSGSGHHHHHH

SEQ ID NO: 3655 - protein, 457 aa, Synthetic construct
MLHYVDVGPRDGTPVLFLHGNPTSSYVWRNIIPHVAPTHRCIAPDLIGMGKSGKPDLGYFFDDHVRFMDAFIEALGLEEVVLVIHDWGSALGFHWAKRNPERVKGIAFMEFIRPIPTWDEWPEFARETFQAFRTTDVGRKLIIDQNVFIEGTLPMGVVRPLTEVEMDHYREPFLNPVDREPLWRWPNELPIAGEPANIVALVEEYMDWLHQSPVPKLLFWGTPGVLIPPAEAARLAKSLPNCKAVDIGPGLNLLQEDNPDLIGSEIARWLSTLEISGGSGGSGGGGSGGMVFTLEDFVGDWEQTAAYNLDQVLEQGGVSSLLQNLAVSVTPIQRIVRSGENALKIDIHVIIPYEGLSADQMAQIEEVFKVVYPVDDHHFKVILPYGTLVIDGVTPNMLNYFGRPYEGIAVFDGKKITVTGTLWNGNKIIDERLITPDGSMLFRVTINSGSGHHHHHH

SEQ ID NO: 3656 - protein, 457 aa, Synthetic construct
MLHYVDVGPRDGTPVLFLHGNPTSSYVWRNIIPHVAPTHRCIAPDLIGMGKSGKPDLGYFFDDHVRFMDAFIEALGLEEVVLVIHDWGSALGFHWAKRNPERVKGIAFMEFIRPIPTWDEWPEFARETFQAFRTTDVGRKLIIDQNVFIEGTLPMGVVRPLTEVEMDHYREPFLNPVDREPLWRFPNELPIGGEPANIVALVEEYMDWLHQSPVPKLLFWGTPGVLIPPAEAARLAKSLPNCKAVDIGPGLNLLQEDNPDLIGSEIARWLSTLEISGGSGGSGGGGSGGMVFTLEDFVGDWEQTAAYNLDQVLEQGGVSSLLQNLAVSVTPIQRIVRSGENALKIDIHVIIPYEGLSADQMAQIEEVFKVVYPVDDHHFKVILPYGTLVIDGVTPNMLNYFGRPYEGIAVFDGKKITVTGTLWNGNKIIDERLITPDGSMLFRVTINSGSGHHHHHH

SEQ ID NO: 3657 - protein, 457 aa, Synthetic construct
MLHYVDVGPRDGTPVLFLHGNPTSSYVWRNIIPHVAPTHRCIAPDLIGMGKSGKPDLGYFFDDHVRFMDAFIEALGLEEVVLVIHDWGSALGFHWAKRNPERVKGIAFMEFIRPIPTWDEWPEFARETFQAFRTTDVGRKLIIDQNVFIEGTLPMGVVRPLTEVEMDHYREPFLNPVDREPLWRFPNELPIAGEPANIVALAEEYMDWLHQSPVPKLLFWGTPGVLIPPAEAARLAKSLPNCKAVDIGPGLNLLQEDNPDLIGSEIARWLSTLEISGGSGGSGGGGSGGMVFTLEDFVGDWEQTAAYNLDQVLEQGGVSSLLQNLAVSVTPIQRIVRSGENALKIDIHVIIPYEGLSADQMAQIEEVFKVVYPVDDHHFKVILPYGTLVIDGVTPNMLNYFGRPYEGIAVFDGKKITVTGTLWNGNKIIDERLITPDGSMLFRVTINSGSGHHHHHH

SEQ ID NO: 3658 - protein, 457 aa, Synthetic construct
MLHYVDVGPRDGTPVLFLHGNPTSSYVWRNIIPHVAPTHRCIAPDLIGMGKSGKPDLGYFFDDHVRFMDAFIEALGLEEVVLVIHDWGSALGFHWAKRNPERVKGIAFMEFVRTIPTWDEWPEFARETFQAFRTTDVGRKLIIDQNVFIEGTLPMGVVRPLTEVEMDHYREPFLNPVDREPLWRFPNELPIAGEPANIVALVEEYMDWLHQSPVPKLLFWGTPGVLIPPAEAARLAKSLPNCKAVDIGPGLNLLQEDNPDLIGSEIARWLSTLEISGGSGGSGGGGSGGMVFTLEDFVGDWEQTAAYNLDQVLEQGGVSSLLQNLAVSVTPIQRIVRSGENALKIDIHVIIPYEGLSADQMAQIEEVFKVVYPVDDHHFKVILPYGTLVIDGVTPNMLNYFGRPYEGIAVFDGKKITVTGTLWNGNKIIDERLITPDGSMLFRVTINSGSGHHHHHH

SEQ ID NO: 3659 - protein, 457 aa, Synthetic construct
MLHYVDVGPRDGTPVLFLHGNPTSSYVWRNIIPHVAPTHRCIAPDLIGMGKSGKPDLGYFFDDHVRFMDAFIEALGLEEVVLVIHDWGSALGFHWAKRNPERVKGIAFMEFVRPVPTWDEWPEFARETFQAFRTTDVGRKLIIDQNVFIEGTLPMGVVRPLTEVEMDHYREPFLNPVDREPLWRFPNELPIAGEPANIVALVEEYMDWLHQSPVPKLLFWGTPGVLIPPAEAARLAKSLPNCKAVDIGPGLNLLQEDNPDLIGSEIARWLSTLEISGGSGGSGGGGSGGMVFTLEDFVGDWEQTAAYNLDQVLEQGGVSSLLQNLAVSVTPIQRIVRSGENALKIDIHVIIPYEGLSADQMAQIEEVFKVVYPVDDHHFKVILPYGTLVIDGVTPNMLNYFGRPYEGIAVFDGKKITVTGTLWNGNKIIDERLITPDGSMLFRVTINSGSGHHHHHH

SEQ ID NO: 3660 - protein, 457 aa, Synthetic construct
MLHYVDVGPRDGTPVLFLHGNPTSSYVWRNIIPHVAPTHRCIAPDLIGMGKSGKPDLGYFFDDHVRFMDAFIEALGLEEVVLVIHDWGSALGFHWAKRNPERVKGIAFMEFVRPIGTWDEWPEFARETFQAFRTTDVGRKLIIDQNVFIEGTLPMGVVRPLTEVEMDHYREPFLNPVDREPLWRFPNELPIAGEPANIVALVEEYMDWLHQSPVPKLLFWGTPGVLIPPAEAARLAKSLPNCKAVDIGPGLNLLQEDNPDLIGSEIARWLSTLEISGGSGGSGGGGSGGMVFTLEDFVGDWEQTAAYNLDQVLEQGGVSSLLQNLAVSVTPIQRIVRSGENALKIDIHVIIPYEGLSADQMAQIEEVFKVVYPVDDHHFKVILPYGTLVIDGVTPNMLNYFGRPYEGIAVFDGKKITVTGTLWNGNKIIDERLITPDGSMLFRVTINSGSGHHHHHH

SEQ ID NO: 3661 - protein, 457 aa, Synthetic construct
MLHYVDVGPRDGTPVLFLHGNPTSSYVWRNIIPHVAPTHRCIAPDLIGMGKSGKPDLGYFFDDHVRFMDAFIEALGLEEVVLVIHDWGSALGFHWAKRNPERVKGIAFMEFVRPIPDWDEWPEFARETFQAFRTTDVGRKLIIDQNVFIEGTLPMGVVRPLTEVEMDHYREPFLNPVDREPLWRFPNELPIAGEPANIVALVEEYMDWLHQSPVPKLLFWGTPGVLIPPAEAARLAKSLPNCKAVDIGPGLNLLQEDNPDLIGSEIARWLSTLEISGGSGGSGGGGSGGMVFTLEDFVGDWEQTAAYNLDQVLEQGGVSSLLQNLAVSVTPIQRIVRSGENALKIDIHVIIPYEGLSADQMAQIEEVFKVVYPVDDHHFKVILPYGTLVIDGVTPNMLNYFGRPYEGIAVFDGKKITVTGTLWNGNKIIDERLITPDGSMLFRVTINSGSGHHHHHH

SEQ ID NO: 3662 - protein, 457 aa, Synthetic construct
MLHYVDVGPRDGTPVLFLHGNPTSSYVWRNIIPHVAPTHRCIAPDLIGMGKSGKPDLGYFFDDHVRFMDAFIEALGLEEVVLVIHDWGSALGFHWAKRNPERVKGIAFMEFVRPIPTWDEWPEFARKTFQAFRTTDVGRKLIIDQNVFIEGTLPMGVVRPLTEVEMDHYREPFLNPVDREPLWRFPNELPIAGEPANIVALVEEYMDWLHQSPVPKLLFWGTPGVLIPPAEAARLAKSLPNCKAVDIGPGLNLLQEDNPDLIGSEIARWLSTLEISGGSGGSGGGGSGGMVFTLEDFVGDWEQTAAYNLDQVLEQGGVSSLLQNLAVSVTPIQRIVRSGENALKIDIHVIIPYEGLSADQMAQIEEVFKVVYPVDDHHFKVILPYGTLVIDGVTPNMLNYFGRPYEGIAVFDGKKITVTGTLWNGNKIIDERLITPDGSMLFRVTINSGSGHHHHHH

SEQ ID NO: 3663 - protein, 457 aa, Synthetic construct
MLHYVDVGPRDGTPVLFLHGNPTSSYVWRNIIPHVAPTHRCIAPDLIGMGKSGKPDLGYFFDDHVRFMDAFIEALGLEEVVLVIHDWGSALGFHWAKRNPERVKGIAFMEFVRPIPTWDEWPEFARETFRAFRTTDVGRKLIIDQNVFIEGTLPMGVVRPLTEVEMDHYREPFLNPVDREPLWRFPNELPIAGEPANIVALVEEYMDWLHQSPVPKLLFWGTPGVLIPPAEAARLAKSLPNCKAVDIGPGLNLLQEDNPDLIGSEIARWLSTLEISGGSGGSGGGGSGGMVFTLEDFVGDWEQTAAYNLDQVLEQGGVSSLLQNLAVSVTPIQRIVRSGENALKIDIHVIIPYEGLSADQMAQIEEVFKVVYPVDDHHFKVILPYGTLVIDGVTPNMLNYFGRPYEGIAVFDGKKITVTGTLWNGNKIIDERLITPDGSMLFRVTINSGSGHHHHHH

SEQ ID NO: 3664 - protein, 457 aa, Synthetic construct
MLHYVDVGPRDGTPVLFLHGNPTSSYVWRNIIPHVAPTHRCIAPDLIGMGKSGKPDLGYFFDDHVRFMDAFIEALGLEEVVLVIHDWGSALGFHWAKRNPERVKGIAFMEFVRPIPTWDEWPEFARETFQRFRTTDVGRKLIIDQNVFIEGTLPMGVVRPLTEVEMDHYREPFLNPVDREPLWRFPNELPIAGEPANIVALVEEYMDWLHQSPVPKLLFWGTPGVLIPPAEAARLAKSLPNCKAVDIGPGLNLLQEDNPDLIGSEIARWLSTLEISGGSGGSGGGGSGGMVFTLEDFVGDWEQTAAYNLDQVLEQGGVSSLLQNLAVSVTPIQRIVRSGENALKIDIHVIIPYEGLSADQMAQIEEVFKVVYPVDDHHFKVILPYGTLVIDGVTPNMLNYFGRPYEGIAVFDGKKITVTGTLWNGNKIIDERLITPDGSMLFRVTINSGSGHHHHHH

SEQ ID NO: 3665 - protein, 457 aa, Synthetic construct
MLHYVDVGPRDGTPVLFLHGNPTSSYVWRNIIPHVAPTHRCIAPDLIGMGKSGKPDLGYFFDDHVRFMDAFIEALGLEEVVLVIHDWGSALGFHWAKRNPERVKGIAFMEFVRPIPTWDEWPEFARETFQAFRTTDVGRELIIDQNVFIEGTLPMGVVRPLTEVEMDHYREPFLNPVDREPLWRFPNELPIAGEPANIVALVEEYMDWLHQSPVPKLLFWGTPGVLIPPAEAARLAKSLPNCKAVDIGPGLNLLQEDNPDLIGSEIARWLSTLEISGGSGGSGGGGSGGMVFTLEDFVGDWEQTAAYNLDQVLEQGGVSSLLQNLAVSVTPIQRIVRSGENALKIDIHVIIPYEGLSADQMAQIEEVFKVVYPVDDHHFKVILPYGTLVIDGVTPNMLNYFGRPYEGIAVFDGKKITVTGTLWNGNKIIDERLITPDGSMLFRVTINSGSGHHHHHH

SEQ ID NO: 3666 - protein, 457 aa, Synthetic construct
MLHYVDVGPRDGTPVLFLHGNPTSSYVWRNIIPHVAPTHRCIAPDLIGMGKSGKPDLGYFFDDHVRFMDAFIEALGLEEVVLVIHDWGSALGFHWAKRNPERVKGIAFMEFVRPIPTWDEWPEFARETFQAFRTTDVGRKLIIDQNVIIEGTLPMGVVRPLTEVEMDHYREPFLNPVDREPLWRFPNELPIAGEPANIVALVEEYMDWLHQSPVPKLLFWGTPGVLIPPAEAARLAKSLPNCKAVDIGPGLNLLQEDNPDLIGSEIARWLSTLEISGGSGGSGGGGSGGMVFTLEDFVGDWEQTAAYNLDQVLEQGGVSSLLQNLAVSVTPIQRIVRSGENALKIDIHVIIPYEGLSADQMAQIEEVFKVVYPVDDHHFKVILPYGTLVIDGVTPNMLNYFGRPYEGIAVFDGKKITVTGTLWNGNKIIDERLITPDGSMLFRVTINSGSGHHHHHH

SEQ ID NO: 3667 - protein, 457 aa, Synthetic construct
MLHYVDVGPRDGTPVLFLHGNPTSSYVWRNIIPHVAPTHRCIAPDLIGMGKSGKPDLGYFFDDHVRFMDAFIEALGLEEVVLVIHDWGSALGFHWAKRNPERVKGIAFMEFVRPIPTWDEWPEFARETFQAFRTTDVGRKLIIDQNVLIEGTLPMGVVRPLTEVEMDHYREPFLNPVDREPLWRFPNELPIAGEPANIVALVEEYMDWLHQSPVPKLLFWGTPGVLIPPAEAARLAKSLPNCKAVDIGPGLNLLQEDNPDLIGSEIARWLSTLEISGGSGGSGGGGSGGMVFTLEDFVGDWEQTAAYNLDQVLEQGGVSSLLQNLAVSVTPIQRIVRSGENALKIDIHVIIPYEGLSADQMAQIEEVFKVVYPVDDHHFKVILPYGTLVIDGVTPNMLNYFGRPYEGIAVFDGKKITVTGTLWNGNKIIDERLITPDGSMLFRVTINSGSGHHHHHH

SEQ ID NO: 3668 - protein, 457 aa, Synthetic construct
MLHYVDVGPRDGTPVLFLHGNPTSSYVWRNIIPHVAPTHRCIAPDLIGMGKSGKPDLGYFFDDHVRFMDAFIEALGLEEVVLVIHDWGSALGFHWAKRNPERVKGIAFMEFVRPIPTWDEWPEFARETFQAFRTTDVGRKLIIDQNVFIEGTLRMGVVRPLTEVEMDHYREPFLNPVDREPLWRFPNELPIAGEPANIVALVEEYMDWLHQSPVPKLLFWGTPGVLIPPAEAARLAKSLPNCKAVDIGPGLNLLQEDNPDLIGSEIARWLSTLEISGGSGGSGGGGSGGMVFTLEDFVGDWEQTAAYNLDQVLEQGGVSSLLQNLAVSVTPIQRIVRSGENALKIDIHVIIPYEGLSADQMAQIEEVFKVVYPVDDHHFKVILPYGTLVIDGVTPNMLNYFGRPYEGIAVFDGKKITVTGTLWNGNKIIDERLITPDGSMLFRVTINSGSGHHHHHH

SEQ ID NO: 3669 - protein, 457 aa, Synthetic construct
MLHYVDVGPRDGTPVLFLHGNPTSSYVWRNIIPHVAPTHRCIAPDLIGMGKSGKPDLGYFFDDHVRFMDAFIEALGLEEVVLVIHDWGSALGFHWAKRNPERVKGIAFMEFVRPIPTWDEWPEFARETFQAFRTTDVGRKLIIDQNVFIEGTLPMGVVRPLTEVEMDHYREPFLNAVDREPLWRFPNELPIAGEPANIVALVEEYMDWLHQSPVPKLLFWGTPGVLIPPAEAARLAKSLPNCKAVDIGPGLNLLQEDNPDLIGSEIARWLSTLEISGGSGGSGGGGSGGMVFTLEDFVGDWEQTAAYNLDQVLEQGGVSSLLQNLAVSVTPIQRIVRSGENALKIDIHVIIPYEGLSADQMAQIEEVFKVVYPVDDHHFKVILPYGTLVIDGVTPNMLNYFGRPYEGIAVFDGKKITVTGTLWNGNKIIDERLITPDGSMLFRVTINSGSGHHHHHH

SEQ ID NO: 3670 - protein, 457 aa, Synthetic construct
MLHYVDVGPRDGTPVLFLHGNPTSSYVWRNIIPHVAPTHRCIAPDLIGMGKSGKPDLGYFFDDHVRFMDAFIEALGLEEVVLVIHDWGSALGFHWAKRNPERVKGIAFMEFVRPIPTWDEWPEFARETFQAFRTTDVGRKLIIDQNVFIEGTLPMGVVRPLTEVEMDHYREPFLNPVDREPLWRWPNELPIAGEPANIVALVEEYMDWLHQSPVPKLLFWGTPGVLIPPAEAARLAKSLPNCKAVDIGPGLNLLQEDNPDLIGSEIARWLSTLEISGGSGGSGGGGSGGMVFTLEDFVGDWEQTAAYNLDQVLEQGGVSSLLQNLAVSVTPIQRIVRSGENALKIDIHVIIPYEGLSADQMAQIEEVFKVVYPVDDHHFKVILPYGTLVIDGVTPNMLNYFGRPYEGIAVFDGKKITVTGTLWNGNKIIDERLITPDGSMLFRVTINSGSGHHHHHH

SEQ ID NO: 3671 - protein, 457 aa, Synthetic construct
MLHYVDVGPRDGTPVLFLHGNPTSSYVWRNIIPHVAPTHRCIAPDLIGMGKSGKPDLGYFFDDHVRFMDAFIEALGLEEVVLVIHDWGSALGFHWAKRNPERVKGIAFMEFVRPIPTWDEWPEFARETFQAFRTTDVGRKLIIDQNVFIEGTLPMGVVRPLTEVEMDHYREPFLNPVDREPLWRFPNELPIGGEPANIVALVEEYMDWLHQSPVPKLLFWGTPGVLIPPAEAARLAKSLPNCKAVDIGPGLNLLQEDNPDLIGSEIARWLSTLEISGGSGGSGGGGSGGMVFTLEDFVGDWEQTAAYNLDQVLEQGGVSSLLQNLAVSVTPIQRIVRSGENALKIDIHVIIPYEGLSADQMAQIEEVFKVVYPVDDHHFKVILPYGTLVIDGVTPNMLNYFGRPYEGIAVFDGKKITVTGTLWNGNKIIDERLITPDGSMLFRVTINSGSGHHHHHH

SEQ ID NO: 3672 - protein, 457 aa, Synthetic construct
MLHYVDVGPRDGTPVLFLHGNPTSSYVWRNIIPHVAPTHRCIAPDLIGMGKSGKPDLGYFFDDHVRFMDAFIEALGLEEVVLVIHDWGSALGFHWAKRNPERVKGIAFMEFVRPIPTWDEWPEFARETFQAFRTTDVGRKLIIDQNVFIEGTLPMGVVRPLTEVEMDHYREPFLNPVDREPLWRFPNELPIAGEPANIVALAEEYMDWLHQSPVPKLLFWGTPGVLIPPAEAARLAKSLPNCKAVDIGPGLNLLQEDNPDLIGSEIARWLSTLEISGGSGGSGGGGSGGMVFTLEDFVGDWEQTAAYNLDQVLEQGGVSSLLQNLAVSVTPIQRIVRSGENALKIDIHVIIPYEGLSADQMAQIEEVFKVVYPVDDHHFKVILPYGTLVIDGVTPNMLNYFGRPYEGIAVFDGKKITVTGTLWNGNKIIDERLITPDGSMLFRVTINSGSGHHHHHH

SEQ ID NO: 3673 - protein, 457 aa, Synthetic construct; identical to SEQ ID NO: 3658

SEQ ID NO: 3674 - protein, 457 aa, Synthetic construct
MLHYVDVGPRDGTPVLFLHGNPTSSYVWRNIIPHVAPTHRCIAPDLIGMGKSGKPDLGYFFDDHVRFMDAFIEALGLEEVVLVIHDWGSALGFHWAKRNPERVKGIAFMEFIRTVPTWDEWPEFARETFQAFRTTDVGRKLIIDQNVFIEGTLPMGVVRPLTEVEMDHYREPFLNPVDREPLWRFPNELPIAGEPANIVALVEEYMDWLHQSPVPKLLFWGTPGVLIPPAEAARLAKSLPNCKAVDIGPGLNLLQEDNPDLIGSEIARWLSTLEISGGSGGSGGGGSGGMVFTLEDFVGDWEQTAAYNLDQVLEQGGVSSLLQNLAVSVTPIQRIVRSGENALKIDIHVIIPYEGLSADQMAQIEEVFKVVYPVDDHHFKVILPYGTLVIDGVTPNMLNYFGRPYEGIAVFDGKKITVTGTLWNGNKIIDERLITPDGSMLFRVTINSGSGHHHHHH

SEQ ID NO: 3675 - protein, 457 aa, Synthetic construct
MLHYVDVGPRDGTPVLFLHGNPTSSYVWRNIIPHVAPTHRCIAPDLIGMGKSGKPDLGYFFDDHVRFMDAFIEALGLEEVVLVIHDWGSALGFHWAKRNPERVKGIAFMEFIRTIGTWDEWPEFARETFQAFRTTDVGRKLIIDQNVFIEGTLPMGVVRPLTEVEMDHYREPFLNPVDREPLWRFPNELPIAGEPANIVALVEEYMDWLHQSPVPKLLFWGTPGVLIPPAEAARLAKSLPNCKAVDIGPGLNLLQEDNPDLIGSEIARWLSTLEISGGSGGSGGGGSGGMVFTLEDFVGDWEQTAAYNLDQVLEQGGVSSLLQNLAVSVTPIQRIVRSGENALKIDIHVIIPYEGLSADQMAQIEEVFKVVYPVDDHHFKVILPYGTLVIDGVTPNMLNYFGRPYEGIAVFDGKKITVTGTLWNGNKIIDERLITPDGSMLFRVTINSGSGHHHHHH

SEQ ID NO: 3676 - protein, 457 aa, Synthetic construct
MLHYVDVGPRDGTPVLFLHGNPTSSYVWRNIIPHVAPTHRCIAPDLIGMGKSGKPDLGYFFDDHVRFMDAFIEALGLEEVVLVIHDWGSALGFHWAKRNPERVKGIAFMEFIRTIPDWDEWPEFARETFQAFRTTDVGRKLIIDQNVFIEGTLPMGVVRPLTEVEMDHYREPFLNPVDREPLWRFPNELPIAGEPANIVALVEEYMDWLHQSPVPKLLFWGTPGVLIPPAEAARLAKSLPNCKAVDIGPGLNLLQEDNPDLIGSEIARWLSTLEISGGSGGSGGGGSGGMVFTLEDFVGDWEQTAAYNLDQVLEQGGVSSLLQNLAVSVTPIQRIVRSGENALKIDIHVIIPYEGLSADQMAQIEEVFKVVYPVDDHHFKVILPYGTLVIDGVTPNMLNYFGRPYEGIAVFDGKKITVTGTLWNGNKIIDERLITPDGSMLFRVTINSGSGHHHHHH

SEQ ID NO: 3677 - protein, 457 aa, Synthetic construct
MLHYVDVGPRDGTPVLFLHGNPTSSYVWRNIIPHVAPTHRCIAPDLIGMGKSGKPDLGYFFDDHVRFMDAFIEALGLEEVVLVIHDWGSALGFHWAKRNPERVKGIAFMEFIRTIPTWDEWPEFARKTFQAFRTTDVGRKLIIDQNVFIEGTLPMGVVRPLTEVEMDHYREPFLNPVDREPLWRFPNELPIAGEPANIVALVEEYMDWLHQSPVPKLLFWGTPGVLIPPAEAARLAKSLPNCKAVDIGPGLNLLQEDNPDLIGSEIARWLSTLEISGGSGGSGGGGSGGMVFTLEDFVGDWEQTAAYNLDQVLEQGGVSSLLQNLAVSVTPIQRIVRSGENALKIDIHVIIPYEGLSADQMAQIEEVFKVVYPVDDHHFKVILPYGTLVIDGVTPNMLNYFGRPYEGIAVFDGKKITVTGTLWNGNKIIDERLITPDGSMLFRVTINSGSGHHHHHH

SEQ ID NO: 3678 - protein, 457 aa, Synthetic construct
MLHYVDVGPRDGTPVLFLHGNPTSSYVWRNIIPHVAPTHRCIAPDLIGMGKSGKPDLGYFFDDHVRFMDAFIEALGLEEVVLVIHDWGSALGFHWAKRNPERVKGIAFMEFIRTIPTWDEWPEFARETFRAFRTTDVGRKLIIDQNVFIEGTLPMGVVRPLTEVEMDHYREPFLNPVDREPLWRFPNELPIAGEPANIVALVEEYMDWLHQSPVPKLLFWGTPGVLIPPAEAARLAKSLPNCKAVDIGPGLNLLQEDNPDLIGSEIARWLSTLEISGGSGGSGGGGSGGMVFTLEDFVGDWEQTAAYNLDQVLEQGGVSSLLQNLAVSVTPIQRIVRSGENALKIDIHVIIPYEGLSADQMAQIEEVFKVVYPVDDHHFKVILPYGTLVIDGVTPNMLNYFGRPYEGIAVFDGKKITVTGTLWNGNKIIDERLITPDGSMLFRVTINSGSGHHHHHH

SEQ ID NO: 3679 - protein, 457 aa, Synthetic construct
MLHYVDVGPRDGTPVLFLHGNPTSSYVWRNIIPHVAPTHRCIAPDLIGMGKSGKPDLGYFFDDHVRFMDAFIEALGLEEVVLVIHDWGSALGFHWAKRNPERVKGIAFMEFIRTIPTWDEWPEFARETFQRFRTTDVGRKLIIDQNVFIEGTLPMGVVRPLTEVEMDHYREPFLNPVDREPLWRFPNELPIAGEPANIVALVEEYMDWLHQSPVPKLLFWGTPGVLIPPAEAARLAKSLPNCKAVDIGPGLNLLQEDNPDLIGSEIARWLSTLEISGGSGGSGGGGSGGMVFTLEDFVGDWEQTAAYNLDQVLEQGGVSSLLQNLAVSVTPIQRIVRSGENALKIDIHVIIPYEGLSADQMAQIEEVFKVVYPVDDHHFKVILPYGTLVIDGVTPNMLNYFGRPYEGIAVFDGKKITVTGTLWNGNKIIDERLITPDGSMLFRVTINSGSGHHHHHH

SEQ ID NO: 3680 - protein, 457 aa, Synthetic construct
MLHYVDVGPRDGTPVLFLHGNPTSSYVWRNIIPHVAPTHRCIAPDLIGMGKSGKPDLGYFFDDHVRFMDAFIEALGLEEVVLVIHDWGSALGFHWAKRNPERVKGIAFMEFIRTIPTWDEWPEFARETFQAFRTTDVGRELIIDQNVFIEGTLPMGVVRPLTEVEMDHYREPFLNPVDREPLWRFPNELPIAGEPANIVALVEEYMDWLHQSPVPKLLFWGTPGVLIPPAEAARLAKSLPNCKAVDIGPGLNLLQEDNPDLIGSEIARWLSTLEISGGSGGSGGGGSGGMVFTLEDFVGDWEQTAAYNLDQVLEQGGVSSLLQNLAVSVTPIQRIVRSGENALKIDIHVIIPYEGLSADQMAQIEEVFKVVYPVDDHHFKVILPYGTLVIDGVTPNMLNYFGRPYEGIAVFDGKKITVTGTLWNGNKIIDERLITPDGSMLFRVTINSGSGHHHHHH

SEQ ID NO: 3681 - protein, 457 aa, Synthetic construct
MLHYVDVGPRDGTPVLFLHGNPTSSYVWRNIIPHVAPTHRCIAPDLIGMGKSGKPDLGYFFDDHVRFMDAFIEALGLEEVVLVIHDWGSALGFHWAKRNPERVKGIAFMEFIRTIPTWDEWPEFARETFQAFRTTDVGRKLIIDQNVIIEGTLPMGVVRPLTEVEMDHYREPFLNPVDREPLWRFPNELPIAGEPANIVALVEEYMDWLHQSPVPKLLFWGTPGVLIPPAEAARLAKSLPNCKAVDIGPGLNLLQEDNPDLIGSEIARWLSTLEISGGSGGSGGGGSGGMVFTLEDFVGDWEQTAAYNLDQVLEQGGVSSLLQNLAVSVTPIQRIVRSGENALKIDIHVIIPYEGLSADQMAQIEEVFKVVYPVDDHHFKVILPYGTLVIDGVTPNMLNYFGRPYEGIAVFDGKKITVTGTLWNGNKIIDERLITPDGSMLFRVTINSGSGHHHHHH

SEQ ID NO: 3682 - protein, 457 aa, Synthetic construct
MLHYVDVGPRDGTPVLFLHGNPTSSYVWRNIIPHVAPTHRCIAPDLIGMGKSGKPDLGYFFDDHVRFMDAFIEALGLEEVVLVIHDWGSALGFHWAKRNPERVKGIAFMEFIRTIPTWDEWPEFARETFQAFRTTDVGRKLIIDQNVLIEGTLPMGVVRPLTEVEMDHYREPFLNPVDREPLWRFPNELPIAGEPANIVALVEEYMDWLHQSPVPKLLFWGTPGVLIPPAEAARLAKSLPNCKAVDIGPGLNLLQEDNPDLIGSEIARWLSTLEISGGSGGSGGGGSGGMVFTLEDFVGDWEQTAAYNLDQVLEQGGVSSLLQNLAVSVTPIQRIVRSGENALKIDIHVIIPYEGLSADQMAQIEEVFKVVYPVDDHHFKVILPYGTLVIDGVTPNMLNYFGRPYEGIAVFDGKKITVTGTLWNGNKIIDERLITPDGSMLFRVTINSGSGHHHHHH

SEQ ID NO: 3683 - protein, 457 aa, Synthetic construct
MLHYVDVGPRDGTPVLFLHGNPTSSYVWRNIIPHVAPTHRCIAPDLIGMGKSGKPDLGYFFDDHVRFMDAFIEALGLEEVVLVIHDWGSALGFHWAKRNPERVKGIAFMEFIRTIPTWDEWPEFARETFQAFRTTDVGRKLIIDQNVFIEGTLRMGVVRPLTEVEMDHYREPFLNPVDREPLWRFPNELPIAGEPANIVALVEEYMDWLHQSPVPKLLFWGTPGVLIPPAEAARLAKSLPNCKAVDIGPGLNLLQEDNPDLIGSEIARWLSTLEISGGSGGSGGGGSGGMVFTLEDFVGDWEQTAAYNLDQVLEQGGVSSLLQNLAVSVTPIQRIVRSGENALKIDIHVIIPYEGLSADQMAQIEEVFKVVYPVDDHHFKVILPYGTLVIDGVTPNMLNYFGRPYEGIAVFDGKKITVTGTLWNGNKIIDERLITPDGSMLFRVTINSGSGHHHHHH

SEQ ID NO: 3684 - protein, 457 aa, Synthetic construct
MLHYVDVGPRDGTPVLFLHGNPTSSYVWRNIIPHVAPTHRCIAPDLIGMGKSGKPDLGYFFDDHVRFMDAFIEALGLEEVVLVIHDWGSALGFHWAKRNPERVKGIAFMEFIRTIPTWDEWPEFARETFQAFRTTDVGRKLIIDQNVFIEGTLPMGVVRPLTEVEMDHYREPFLNAVDREPLWRFPNELPIAGEPANIVALVEEYMDWLHQSPVPKLLFWGTPGVLIPPAEAARLAKSLPNCKAVDIGPGLNLLQEDNPDLIGSEIARWLSTLEISGGSGGSGGGGSGGMVFTLEDFVGDWEQTAAYNLDQVLEQGGVSSLLQNLAVSVTPIQRIVRSGENALKIDIHVIIPYEGLSADQMAQIEEVFKVVYPVDDHHFKVILPYGTLVIDGVTPNMLNYFGRPYEGIAVFDGKKITVTGTLWNGNKIIDERLITPDGSMLFRVTINSGSGHHHHHH

SEQ ID NO: 3685 - protein, 457 aa, Synthetic construct
MLHYVDVGPRDGTPVLFLHGNPTSSYVWRNIIPHVAPTHRCIAPDLIGMGKSGKPDLGYFFDDHVRFMDAFIEALGLEEVVLVIHDWGSALGFHWAKRNPERVKGIAFMEFIRTIPTWDEWPEFARETFQAFRTTDVGRKLIIDQNVFIEGTLPMGVVRPLTEVEMDHYREPFLNPVDREPLWRWPNELPIAGEPANIVALVEEYMDWLHQSPVPKLLFWGTPGVLIPPAEAARLAKSLPNCKAVDIGPGLNLLQEDNPDLIGSEIARWLSTLEISGGSGGSGGGGSGGMVFTLEDFVGDWEQTAAYNLDQVLEQGGVSSLLQNLAVSVTPIQRIVRSGENALKIDIHVIIPYEGLSADQMAQIEEVFKVVYPVDDHHFKVILPYGTLVIDGVTPNMLNYFGRPYEGIAVFDGKKITVTGTLWNGNKIIDERLITPDGSMLFRVTINSGSGHHHHHH

SEQ ID NO: 3686 - protein, 457 aa, Synthetic construct
MLHYVDVGPRDGTPVLFLHGNPTSSYVWRNIIPHVAPTHRCIAPDLIGMGKSGKPDLGYFFDDHVRFMDAFIEALGLEEVVLVIHDWGSALGFHWAKRNPERVKGIAFMEFIRTIPTWDEWPEFARETFQAFRTTDVGRKLIIDQNVFIEGTLPMGVVRPLTEVEMDHYREPFLNPVDREPLWRFPNELPIGGEPANIVALVEEYMDWLHQSPVPKLLFWGTPGVLIPPAEAARLAKSLPNCKAVDIGPGLNLLQEDNPDLIGSEIARWLSTLEISGGSGGSGGGGSGGMVFTLEDFVGDWEQTAAYNLDQVLEQGGVSSLLQNLAVSVTPIQRIVRSGENALKIDIHVIIPYEGLSADQMAQIEEVFKVVYPVDDHHFKVILPYGTLVIDGVTPNMLNYFGRPYEGIAVFDGKKITVTGTLWNGNKIIDERLITPDGSMLFRVTINSGSGHHHHHH

SEQ ID NO: 3687 - protein, 457 aa, Synthetic construct
MLHYVDVGPRDGTPVLFLHGNPTSSYVWRNIIPHVAPTHRCIAPDLIGMGKSGKPDLGYFFDDHVRFMDAFIEALGLEEVVLVIHDWGSALGFHWAKRNPERVKGIAFMEFIRTIPTWDEWPEFARETFQAFRTTDVGRKLIIDQNVFIEGTLPMGVVRPLTEVEMDHYREPFLNPVDREPLWRFPNELPIAGEPANIVALAEEYMDWLHQSPVPKLLFWGTPGVLIPPAEAARLAKSLPNCKAVDIGPGLNLLQEDNPDLIGSEIARWLSTLEISGGSGGSGGGGSGGMVFTLEDFVGDWEQTAAYNLDQVLEQGGVSSLLQNLAVSVTPIQRIVRSGENALKIDIHVIIPYEGLSADQMAQIEEVFKVVYPVDDHHFKVILPYGTLVIDGVTPNMLNYFGRPYEGIAVFDGKKITVTGTLWNGNKIIDERLITPDGSMLFRVTINSGSGHHHHHH

SEQ ID NO: 3688 - protein, 457 aa, Synthetic construct; identical to SEQ ID NO: 3659

SEQ ID NO: 3689 - protein, 457 aa, Synthetic construct; identical to SEQ ID NO: 3674

SEQ ID NO: 3690 - protein, 457 aa, Synthetic construct
MLHYVDVGPRDGTPVLFLHGNPTSSYVWRNIIPHVAPTHRCIAPDLIGMGKSGKPDLGYFFDDHVRFMDAFIEALGLEEVVLVIHDWGSALGFHWAKRNPERVKGIAFMEFIRPVGTWDEWPEFARETFQAFRTTDVGRKLIIDQNVFIEGTLPMGVVRPLTEVEMDHYREPFLNPVDREPLWRFPNELPIAGEPANIVALVEEYMDWLHQSPVPKLLFWGTPGVLIPPAEAARLAKSLPNCKAVDIGPGLNLLQEDNPDLIGSEIARWLSTLEISGGSGGSGGGGSGGMVFTLEDFVGDWEQTAAYNLDQVLEQGGVSSLLQNLAVSVTPIQRIVRSGENALKIDIHVIIPYEGLSADQMAQIEEVFKVVYPVDDHHFKVILPYGTLVIDGVTPNMLNYFGRPYEGIAVFDGKKITVTGTLWNGNKIIDERLITPDGSMLFRVTINSGSGHHHHHH

SEQ ID NO: 3691 - protein, 457 aa, Synthetic construct
MLHYVDVGPRDGTPVLFLHGNPTSSYVWRNIIPHVAPTHRCIAPDLIGMGKSGKPDLGYFFDDHVRFMDAFIEALGLEEVVLVIHDWGSALGFHWAKRNPERVKGIAFMEFIRPVPDWDEWPEFARETFQAFRTTDVGRKLIIDQNVFIEGTLPMGVVRPLTEVEMDHYREPFLNPVDREPLWRFPNELPIAGEPANIVALVEEYMDWLHQSPVPKLLFWGTPGVLIPPAEAARLAKSLPNCKAVDIGPGLNLLQEDNPDLIGSEIARWLSTLEISGGSGGSGGGGSGGMVFTLEDFVGDWEQTAAYNLDQVLEQGGVSSLLQNLAVSVTPIQRIVRSGENALKIDIHVIIPYEGLSADQMAQIEEVFKVVYPVDDHHFKVILPYGTLVIDGVTPNMLNYFGRPYEGIAVFDGKKITVTGTLWNGNKIIDERLITPDGSMLFRVTINSGSGHHHHHH

SEQ ID NO: 3692 - protein, 457 aa, Synthetic construct
MLHYVDVGPRDGTPVLFLHGNPTSSYVWRNIIPHVAPTHRCIAPDLIGMGKSGKPDLGYFFDDHVRFMDAFIEALGLEEVVLVIHDWGSALGFHWAKRNPERVKGIAFMEFIRPVPTWDEWPEFARKTFQAFRTTDVGRKLIIDQNVFIEGTLPMGVVRPLTEVEMDHYREPFLNPVDREPLWRFPNELPIAGEPANIVALVEEYMDWLHQSPVPKLLFWGTPGVLIPPAEAARLAKSLPNCKAVDIGPGLNLLQEDNPDLIGSEIARWLSTLEISGGSGGSGGGGSGGMVFTLEDFVGDWEQTAAYNLDQVLEQGGVSSLLQNLAVSVTPIQRIVRSGENALKIDIHVIIPYEGLSADQMAQIEEVFKVVYPVDDHHFKVILPYGTLVIDGVTPNMLNYFGRPYEGIAVFDGKKITVTGTLWNGNKIIDERLITPDGSMLFRVTINSGSGHHHHHH

SEQ ID NO: 3693 - protein, 457 aa, Synthetic construct
MLHYVDVGPRDGTPVLFLHGNPTSSYVWRNIIPHVAPTHRCIAPDLIGMGKSGKPDLGYFFDDHVRFMDAFIEALGLEEVVLVIHDWGSALGFHWAKRNPERVKGIAFMEFIRPVPTWDEWPEFARETFRAFRTTDVGRKLIIDQNVFIEGTLPMGVVRPLTEVEMDHYREPFLNPVDREPLWRFPNELPIAGEPANIVALVEEYMDWLHQSPVPKLLFWGTPGVLIPPAEAARLAKSLPNCKAVDIGPGLNLLQEDNPDLIGSEIARWLSTLEISGGSGGSGGGGSGGMVFTLEDFVGDWEQTAAYNLDQVLEQGGVSSLLQNLAVSVTPIQRIVRSGENALKIDIHVIIPYEGLSADQMAQIEEVFKVVYPVDDHHFKVILPYGTLVIDGVTPNMLNYFGRPYEGIAVFDGKKITVTGTLWNGNKIIDERLITPDGSMLFRVTINSGSGHHHHHH

SEQ ID NO: 3694 - protein, 457 aa, Synthetic construct
MLHYVDVGPRDGTPVLFLHGNPTSSYVWRNIIPHVAPTHRCIAPDLIGMGKSGKPDLGYFFDDHVRFMDAFIEALGLEEVVLVIHDWGSALGFHWAKRNPERVKGIAFMEFIRPVPTWDEWPEFARETFQRFRTTDVGRKLIIDQNVFIEGTLPMGVVRPLTEVEMDHYREPFLNPVDREPLWRFPNELPIAGEPANIVALVEEYMDWLHQSPVPKLLFWGTPGVLIPPAEAARLAKSLPNCKAVDIGPGLNLLQEDNPDLIGSEIARWLSTLEISGGSGGSGGGGSGGMVFTLEDFVGDWEQTAAYNLDQVLEQGGVSSLLQNLAVSVTPIQRIVRSGENALKIDIHVIIPYEGLSADQMAQIEEVFKVVYPVDDHHFKVILPYGTLVIDGVTPNMLNYFGRPYEGIAVFDGKKITVTGTLWNGNKIIDERLITPDGSMLFRVTINSGSGHHHHHH

SEQ ID NO: 3695 - protein, 457 aa, Synthetic construct
MLHYVDVGPRDGTPVLFLHGNPTSSYVWRNIIPHVAPTHRCIAPDLIGMGKSGKPDLGYFFDDHVRFMDAFIEALGLEEVVLVIHDWGSALGFHWAKRNPERVKGIAFMEFIRPVPTWDEWPEFARETFQAFRTTDVGRELIIDQNVFIEGTLPMGVVRPLTEVEMDHYREPFLNPVDREPLWRFPNELPIAGEPANIVALVEEYMDWLHQSPVPKLLFWGTPGVLIPPAEAARLAKSLPNCKAVDIGPGLNLLQEDNPDLIGSEIARWLSTLEISGGSGGSGGGGSGGMVFTLEDFVGDWEQTAAYNLDQVLEQGGVSSLLQNLAVSVTPIQRIVRSGENALKIDIHVIIPYEGLSADQMAQIEEVFKVVYPVDDHHFKVILPYGTLVIDGVTPNMLNYFGRPYEGIAVFDGKKITVTGTLWNGNKIIDERLITPDGSMLFRVTINSGSGHHHHHH

SEQ ID NO: 3696 - protein, 457 aa, Synthetic construct
MLHYVDVGPRDGTPVLFLHGNPTSSYVWRNIIPHVAPTHRCIAPDLIGMGKSGKPDLGYFFDDHVRFMDAFIEALGLEEVVLVIHDWGSALGFHWAKRNPERVKGIAFMEFIRPVPTWDEWPEFARETFQAFRTTDVGRKLIIDQNVIIEGTLPMGVVRPLTEVEMDHYREPFLNPVDREPLWRFPNELPIAGEPANIVALVEEYMDWLHQSPVPKLLFWGTPGVLIPPAEAARLAKSLPNCKAVDIGPGLNLLQEDNPDLIGSEIARWLSTLEISGGSGGSGGGGSGGMVFTLEDFVGDWEQTAAYNLDQVLEQGGVSSLLQNLAVSVTPIQRIVRSGENALKIDIHVIIPYEGLSADQMAQIEEVFKVVYPVDDHHFKVILPYGTLVIDGVTPNMLNYFGRPYEGIAVFDGKKITVTGTLWNGNKIIDERLITPDGSMLFRVTINSGSGHHHHHH

SEQ ID NO: 3697 - protein, 457 aa, Synthetic construct
MLHYVDVGPRDGTPVLFLHGNPTSSYVWRNIIPHVAPTHRCIAPDLIGMGKSGKPDLGYFFDDHVRFMDAFIEALGLEEVVLVIHDWGSALGFHWAKRNPERVKGIAFMEFIRPVPTWDEWPEFARETFQAFRTTDVGRKLIIDQNVLIEGTLPMGVVRPLTEVEMDHYREPFLNPVDREPLWRFPNELPIAGEPANIVALVEEYMDWLHQSPVPKLLFWGTPGVLIPPAEAARLAKSLPNCKAVDIGPGLNLLQEDNPDLIGSEIARWLSTLEISGGSGGSGGGGSGGMVFTLEDFVGDWEQTAAYNLDQVLEQGGVSSLLQNLAVSVTPIQRIVRSGENALKIDIHVIIPYEGLSADQMAQIEEVFKVVYPVDDHHFKVILPYGTLVIDGVTPNMLNYFGRPYEGIAVFDGKKITVTGTLWNGNKIIDERLITPDGSMLFRVTINSGSGHHHHHH

SEQ ID NO: 3698 - protein, 457 aa, Synthetic construct
MLHYVDVGPRDGTPVLFLHGNPTSSYVWRNIIPHVAPTHRCIAPDLIGMGKSGKPDLGYFFDDHVRFMDAFIEALGLEEVVLVIHDWGSALGFHWAKRNPERVKGIAFMEFIRPVPTWDEWPEFARETFQAFRTTDVGRKLIIDQNVFIEGTLRMGVVRPLTEVEMDHYREPFLNPVDREPLWRFPNELPIAGEPANIVALVEEYMDWLHQSPVPKLLFWGTPGVLIPPAEAARLAKSLPNCKAVDIGPGLNLLQEDNPDLIGSEIARWLSTLEISGGSGGSGGGGSGGMVFTLEDFVGDWEQTAAYNLDQVLEQGGVSSLLQNLAVSVTPIQRIVRSGENALKIDIHVIIPYEGLSADQMAQIEEVFKVVYPVDDHHFKVILPYGTLVIDGVTPNMLNYFGRPYEGIAVFDGKKITVTGTLWNGNKIIDERLITPDGSMLFRVTINSGSGHHHHHH

SEQ ID NO: 3699 - protein, 457 aa, Synthetic construct
MLHYVDVGPRDGTPVLFLHGNPTSSYVWRNIIPHVAPTHRCIAPDLIGMGKSGKPDLGYFFDDHVRFMDAFIEALGLEEVVLVIHDWGSALGFHWAKRNPERVKGIAFMEFIRPVPTWDEWPEFARETFQAFRTTDVGRKLIIDQNVFIEGTLPMGVVRPLTEVEMDHYREPFLNAVDREPLWRFPNELPIAGEPANIVALVEEYMDWLHQSPVPKLLFWGTPGVLIPPAEAARLAKSLPNCKAVDIGPGLNLLQEDNPDLIGSEIARWLSTLEISGGSGGSGGGGSGGMVFTLEDFVGDWEQTAAYNLDQVLEQGGVSSLLQNLAVSVTPIQRIVRSGENALKIDIHVIIPYEGLSADQMAQIEEVFKVVYPVDDHHFKVILPYGTLVIDGVTPNMLNYFGRPYEGIAVFDGKKITVTGTLWNGNKIIDERLITPDGSMLFRVTINSGSGHHHHHH

SEQ ID NO: 3700 - protein, 457 aa, Synthetic construct
MLHYVDVGPRDGTPVLFLHGNPTSSYVWRNIIPHVAPTHRCIAPDLIGMGKSGKPDLGYFFDDHVRFMDAFIEALGLEEVVLVIHDWGSALGFHWAKRNPERVKGIAFMEFIRPVPTWDEWPEFARETFQAFRTTDVGRKLIIDQNVFIEGTLPMGVVRPLTEVEMDHYREPFLNPVDREPLWRWPNELPIAGEPANIVALVEEYMDWLHQSPVPKLLFWGTPGVLIPPAEAARLAKSLPNCKAVDIGPGLNLLQEDNPDLIGSEIARWLSTLEISGGSGGSGGGGSGGMVFTLEDFVGDWEQTAAYNLDQVLEQGGVSSLLQNLAVSVTPIQRIVRSGENALKIDIHVIIPYEGLSADQMAQIEEVFKVVYPVDDHHFKVILPYGTLVIDGVTPNMLNYFGRPYEGIAVFDGKKITVTGTLWNGNKIIDERLITPDGSMLFRVTINSGSGHHHHHH

SEQ ID NO: 3701 - protein, 457 aa, Synthetic construct
MLHYVDVGPRDGTPVLFLHGNPTSSYVWRNIIPHVAPTHRCIAPDLIGMGKSGKPDLGYFFDDHVRFMDAFIEALGLEEVVLVIHDWGSALGFHWAKRNPERVKGIAFMEFIRPVPTWDEWPEFARETFQAFRTTDVGRKLIIDQNVFIEGTLPMGVVRPLTEVEMDHYREPFLNPVDREPLWRFPNELPIGGEPANIVALVEEYMDWLHQSPVPKLLFWGTPGVLIPPAEAARLAKSLPNCKAVDIGPGLNLLQEDNPDLIGSEIARWLSTLEISGGSGGSGGGGSGGMVFTLEDFVGDWEQTAAYNLDQVLEQGGVSSLLQNLAVSVTPIQRIVRSGENALKIDIHVIIPYEGLSADQMAQIEEVFKVVYPVDDHHFKVILPYGTLVIDGVTPNMLNYFGRPYEGIAVFDGKKITVTGTLWNGNKIIDERLITPDGSMLFRVTINSGSGHHHHHH

SEQ ID NO: 3702 - protein, 457 aa, Synthetic construct
MLHYVDVGPRDGTPVLFLHGNPTSSYVWRNIIPHVAPTHRCIAPDLIGMGKSGKPDLGYFFDDHVRFMDAFIEALGLEEVVLVIHDWGSALGFHWAKRNPERVKGIAFMEFIRPVPTWDEWPEFARETFQAFRTTDVGRKLIIDQNVFIEGTLPMGVVRPLTEVEMDHYREPFLNPVDREPLWRFPNELPIAGEPANIVALAEEYMDWLHQSPVPKLLFWGTPGVLIPPAEAARLAKSLPNCKAVDIGPGLNLLQEDNPDLIGSEIARWLSTLEISGGSGGSGGGGSGGMVFTLEDFVGDWEQTAAYNLDQVLEQGGVSSLLQNLAVSVTPIQRIVRSGENALKIDIHVIIPYEGLSADQMAQIEEVFKVVYPVDDHHFKVILPYGTLVIDGVTPNMLNYFGRPYEGIAVFDGKKITVTGTLWNGNKIIDERLITPDGSMLFRVTINSGSGHHHHHH

SEQ ID NO: 3703 - protein, 457 aa, Synthetic construct; identical to SEQ ID NO: 3660

SEQ ID NO: 3704 - protein, 457 aa, Synthetic construct; identical to SEQ ID NO: 3675

SEQ ID NO: 3705 - protein, 457 aa, Synthetic construct; identical to SEQ ID NO: 3690

SEQ ID NO: 3706 - protein, 457 aa, Synthetic construct
MLHYVDVGPRDGTPVLFLHGNPTSSYVWRNIIPHVAPTHRCIAPDLIGMGKSGKPDLGYFFDDHVRFMDAFIEALGLEEVVLVIHDWGSALGFHWAKRNPERVKGIAFMEFIRPIGDWDEWPEFARETFQAFRTTDVGRKLIIDQNVFIEGTLPMGVVRPLTEVEMDHYREPFLNPVDREPLWRFPNELPIAGEPANIVALVEEYMDWLHQSPVPKLLFWGTPGVLIPPAEAARLAKSLPNCKAVDIGPGLNLLQEDNPDLIGSEIARWLSTLEISGGSGGSGGGGSGGMVFTLEDFVGDWEQTAAYNLDQVLEQGGVSSLLQNLAVSVTPIQRIVRSGENALKIDIHVIIPYEGLSADQMAQIEEVFKVVYPVDDHHFKVILPYGTLVIDGVTPNMLNYFGRPYEGIAVFDGKKITVTGTLWNGNKIIDERLITPDGSMLFRVTINSGSGHHHHHH

SEQ ID NO: 3707 - protein, 457 aa, Synthetic construct
MLHYVDVGPRDGTPVLFLHGNPTSSYVWRNIIPHVAPTHRCIAPDLIGMGKSGKPDLGYFFDDHVRFMDAFIEALGLEEVVLVIHDWGSALGFHWAKRNPERVKGIAFMEFIRPIGTWDEWPEFARKTFQAFRTTDVGRKLIIDQNVFIEGTLPMGVVRPLTEVEMDHYREPFLNPVDREPLWRFPNELPIAGEPANIVALVEEYMDWLHQSPVPKLLFWGTPGVLIPPAEAARLAKSLPNCKAVDIGPGLNLLQEDNPDLIGSEIARWLSTLEISGGSGGSGGGGSGGMVFTLEDFVGDWEQTAAYNLDQVLEQGGVSSLLQNLAVSVTPIQRIVRSGENALKIDIHVIIPYEGLSADQMAQIEEVFKVVYPVDDHHFKVILPYGTLVIDGVTPNMLNYFGRPYEGIAVFDGKKITVTGTLWNGNKIIDERLITPDGSMLFRVTINSGSGHHHHHH

SEQ ID NO: 3708 - protein, 457 aa, Synthetic construct
MLHYVDVGPRDGTPVLFLHGNPTSSYVWRNIIPHVAPTHRCIAPDLIGMGKSGKPDLGYFFDDHVRFMDAFIEALGLEEVVLVIHDWGSALGFHWAKRNPERVKGIAFMEFIRPIGTWDEWPEFARETFRAFRTTDVGRKLIIDQNVFIEGTLPMGVVRPLTEVEMDHYREPFLNPVDREPLWRFPNELPIAGEPANIVALVEEYMDWLHQSPVPKLLFWGTPGVLIPPAEAARLAKSLPNCKAVDIGPGLNLLQEDNPDLIGSEIARWLSTLEISGGSGGSGGGGSGGMVFTLEDFVGDWEQTAAYNLDQVLEQGGVSSLLQNLAVSVTPIQRIVRSGENALKIDIHVIIPYEGLSADQMAQIEEVFKVVYPVDDHHFKVILPYGTLVIDGVTPNMLNYFGRPYEGIAVFDGKKITVTGTLWNGNKIIDERLITPDGSMLFRVTINSGSGHHHHHH

SEQ ID NO: 3709 - protein, 457 aa, Synthetic construct
MLHYVDVGPRDGTPVLFLHGNPTSSYVWRNIIPHVAPTHRCIAPDLIGMGKSGKPDLGYFFDDHVRFMDAFIEALGLEEVVLVIHDWGSALGFHWAKRNPERVKGIAFMEFIRPIGTWDEWPEFARETFQRFRTTDVGRKLIIDQNVFIEGTLPMGVVRPLTEVEMDHYREPFLNPVDREPLWRFPNELPIAGEPANIVALVEEYMDWLHQSPVPKLLFWGTPGVLIPPAEAARLAKSLPNCKAVDIGPGLNLLQEDNPDLIGSEIARWLSTLEISGGSGGSGGGGSGGMVFTLEDFVGDWEQTAAYNLDQVLEQGGVSSLLQNLAVSVTPIQRIVRSGENALKIDIHVIIPYEGLSADQMAQIEEVFKVVYPVDDHHFKVILPYGTLVIDGVTPNMLNYFGRPYEGIAVFDGKKITVTGTLWNGNKIIDERLITPDGSMLFRVTINSGSGHHHHHH

SEQ ID NO: 3710 - protein, 457 aa, Synthetic construct
MLHYVDVGPRDGTPVLFLHGNPTSSYVWRNIIPHVAPTHRCIAPDLIGMGKSGKPDLGYFFDDHVRFMDAFIEALGLEEVVLVIHDWGSALGFHWAKRNPERVKGIAFMEFIRPIGTWDEWPEFARETFQAFRTTDVGRELIIDQNVFIEGTLPMGVVRPLTEVEMDHYREPFLNPVDREPLWRFPNELPIAGEPANIVALVEEYMDWLHQSPVPKLLFWGTPGVLIPPAEAARLAKSLPNCKAVDIGPGLNLLQEDNPDLIGSEIARWLSTLEISGGSGGSGGGGSGGMVFTLEDFVGDWEQTAAYNLDQVLEQGGVSSLLQNLAVSVTPIQRIVRSGENALKIDIHVIIPYEGLSADQMAQIEEVFKVVYPVDDHHFKVILPYGTLVIDGVTPNMLNYFGRPYEGIAVFDGKKITVTGTLWNGNKIIDERLITPDGSMLFRVTINSGSGHHHHHH

SEQ ID NO: 3711 - protein, 457 aa, Synthetic construct
MLHYVDVGPRDGTPVLFLHGNPTSSYVWRNIIPHVAPTHRCIAPDLIGMGKSGKPDLGYFFDDHVRFMDAFIEALGLEEVVLVIHDWGSALGFHWAKRNPERVKGIAFMEFIRPIGTWDEWPEFARETFQAFRTTDVGRKLIIDQNVIIEGTLPMGVVRPLTEVEMDHYREPFLNPVDREPLWRFPNELPIAGEPANIVALVEEYMDWLHQSPVPKLLFWGTPGVLIPPAEAARLAKSLPNCKAVDIGPGLNLLQEDNPDLIGSEIARWLSTLEISGGSGGSGGGGSGGMVFTLEDFVGDWEQTAAYNLDQVLEQGGVSSLLQNLAVSVTPIQRIVRSGENALKIDIHVIIPYEGLSADQMAQIEEVFKVVYPVDDHHFKVILPYGTLVIDGVTPNMLNYFGRPYEGIAVFDGKKITVTGTLWNGNKIIDERLITPDGSMLFRVTINSGSGHHHHHH

SEQ ID NO: 3712 - protein, 457 aa, Synthetic construct
MLHYVDVGPRDGTPVLFLHGNPTSSYVWRNIIPHVAPTHRCIAPDLIGMGKSGKPDLGYFFDDHVRFMDAFIEALGLEEVVLVIHDWGSALGFHWAKRNPERVKGIAFMEFIRPIGTWDEWPEFARETFQAFRTTDVGRKLIIDQNVLIEGTLPMGVVRPLTEVEMDHYREPFLNPVDREPLWRFPNELPIAGEPANIVALVEEYMDWLHQSPVPKLLFWGTPGVLIPPAEAARLAKSLPNCKAVDIGPGLNLLQEDNPDLIGSEIARWLSTLEISGGSGGSGGGGSGGMVFTLEDFVGDWEQTAAYNLDQVLEQGGVSSLLQNLAVSVTPIQRIVRSGENALKIDIHVIIPYEGLSADQMAQIEEVFKVVYPVDDHHFKVILPYGTLVIDGVTPNMLNYFGRPYEGIAVFDGKKITVTGTLWNGNKIIDERLITPDGSMLFRVTINSGSGHHHHHH

SEQ ID NO: 3713 - protein, 457 aa, Synthetic construct
MLHYVDVGPRDGTPVLFLHGNPTSSYVWRNIIPHVAPTHRCIAPDLIGMGKSGKPDLGYFFDDHVRFMDAFIEALGLEEVVLVIHDWGSALGFHWAKRNPERVKGIAFMEFIRPIGTWDEWPEFARETFQAFRTTDVGRKLIIDQNVFIEGTLRMGVVRPLTEVEMDHYREPFLNPVDREPLWRFPNELPIAGEPANIVALVEEYMDWLHQSPVPKLLFWGTPGVLIPPAEAARLAKSLPNCKAVDIGPGLNLLQEDNPDLIGSEIARWLSTLEISGGSGGSGGGGSGGMVFTLEDFVGDWEQTAAYNLDQVLEQGGVSSLLQNLAVSVTPIQRIVRSGENALKIDIHVIIPYEGLSADQMAQIEEVFKVVYPVDDHHFKVILPYGTLVIDGVTPNMLNYFGRPYEGIAVFDGKKITVTGTLWNGNKIIDERLITPDGSMLFRVTINSGSGHHHHHH

SEQ ID NO: 3714 - protein, 457 aa, Synthetic construct
MLHYVDVGPRDGTPVLFLHGNPTSSYVWRNIIPHVAPTHRCIAPDLIGMGKSGKPDLGYFFDDHVRFMDAFIEALGLEEVVLVIHDWGSALGFHWAKRNPERVKGIAFMEFIRPIGTWDEWPEFARETFQAFRTTDVGRKLIIDQNVFIEGTLPMGVVRPLTEVEMDHYREPFLNAVDREPLWRFPNELPIAGEPANIVALVEEYMDWLHQSPVPKLLFWGTPGVLIPPAEAARLAKSLPNCKAVDIGPGLNLLQEDNPDLIGSEIARWLSTLEISGGSGGSGGGGSGGMVFTLEDFVGDWEQTAAYNLDQVLEQGGVSSLLQNLAVSVTPIQRIVRSGENALKIDIHVIIPYEGLSADQMAQIEEVFKVVYPVDDHHFKVILPYGTLVIDGVTPNMLNYFGRPYEGIAVFDGKKITVTGTLWNGNKIIDERLITPDGSMLFRVTINSGSGHHHHHH

SEQ ID NO: 3715 - protein, 457 aa, Synthetic construct
MLHYVDVGPRDGTPVLFLHGNPTSSYVWRNIIPHVAPTHRCIAPDLIGMGKSGKPDLGYFFDDHVRFMDAFIEALGLEEVVLVIHDWGSALGFHWAKRNPERVKGIAFMEFIRPIGTWDEWPEFARETFQAFRTTDVGRKLIIDQNVFIEGTLPMGVVRPLTEVEMDHYREPFLNPVDREPLWRWPNELPIAGEPANIVALVEEYMDWLHQSPVPKLLFWGTPGVLIPPAEAARLAKSLPNCKAVDIGPGLNLLQEDNPDLIGSEIARWLSTLEISGGSGGSGGGGSGGMVFTLEDFVGDWEQTAAYNLDQVLEQGGVSSLLQNLAVSVTPIQRIVRSGENALKIDIHVIIPYEGLSADQMAQIEEVFKVVYPVDDHHFKVILPYGTLVIDGVTPNMLNYFGRPYEGIAVFDGKKITVTGTLWNGNKIIDERLITPDGSMLFRVTINSGSGHHHHHH

SEQ ID NO: 3716 - protein, 457 aa, Synthetic construct
MLHYVDVGPRDGTPVLFLHGNPTSSYVWRNIIPHVAPTHRCIAPDLIGMGKSGKPDLGYFFDDHVRFMDAFIEALGLEEVVLVIHDWGSALGFHWAKRNPERVKGIAFMEFIRPIGTWDEWPEFARETFQAFRTTDVGRKLIIDQNVFIEGTLPMGVVRPLTEVEMDHYREPFLNPVDREPLWRFPNELPIGGEPANIVALVEEYMDWLHQSPVPKLLFWGTPGVLIPPAEAARLAKSLPNCKAVDIGPGLNLLQEDNPDLIGSEIARWLSTLEISGGSGGSGGGGSGGMVFTLEDFVGDWEQTAAYNLDQVLEQGGVSSLLQNLAVSVTPIQRIVRSGENALKIDIHVIIPYEGLSADQMAQIEEVFKVVYPVDDHHFKVILPYGTLVIDGVTPNMLNYFGRPYEGIAVFDGKKITVTGTLWNGNKIIDERLITPDGSMLFRVTINSGSGHHHHHH

SEQ ID NO: 3717 - protein, 457 aa, Synthetic construct
MLHYVDVGPRDGTPVLFLHGNPTSSYVWRNIIPHVAPTHRCIAPDLIGMGKSGKPDLGYFFDDHVRFMDAFIEALGLEEVVLVIHDWGSALGFHWAKRNPERVKGIAFMEFIRPIGTWDEWPEFARETFQAFRTTDVGRKLIIDQNVFIEGTLPMGVVRPLTEVEMDHYREPFLNPVDREPLWRFPNELPIAGEPANIVALAEEYMDWLHQSPVPKLLFWGTPGVLIPPAEAARLAKSLPNCKAVDIGPGLNLLQEDNPDLIGSEIARWLSTLEISGGSGGSGGGGSGGMVFTLEDFVGDWEQTAAYNLDQVLEQGGVSSLLQNLAVSVTPIQRIVRSGENALKIDIHVIIPYEGLSADQMAQIEEVFKVVYPVDDHHFKVILPYGTLVIDGVTPNMLNYFGRPYEGIAVFDGKKITVTGTLWNGNKIIDERLITPDGSMLFRVTINSGSGHHHHHH

SEQ ID NO: 3718 - protein, 457 aa, Synthetic construct; identical to SEQ ID NO: 3661

SEQ ID NO: 3719 - protein, 457 aa, Synthetic construct; identical to SEQ ID NO: 3676

SEQ ID NO: 3720 - protein, 457 aa, Synthetic construct; identical to SEQ ID NO: 3691

SEQ ID NO: 3721 - protein, 457 aa, Synthetic construct; identical to SEQ ID NO: 3706

SEQ ID NO: 3722 - protein, 457 aa, Synthetic construct
MLHYVDVGPRDGTPVLFLHGNPTSSYVWRNIIPHVAPTHRCIAPDLIGMGKSGKPDLGYFFDDHVRFMDAFIEALGLEEVVLVIHDWGSALGFHWAKRNPERVKGIAFMEFIRPIPDWDEWPEFARKTFQAFRTTDVGRKLIIDQNVFIEGTLPMGVVRPLTEVEMDHYREPFLNPVDREPLWRFPNELPIAGEPANIVALVEEYMDWLHQSPVPKLLFWGTPGVLIPPAEAARLAKSLPNCKAVDIGPGLNLLQEDNPDLIGSEIARWLSTLEISGGSGGSGGGGSGGMVFTLEDFVGDWEQTAAYNLDQVLEQGGVSSLLQNLAVSVTPIQRIVRSGENALKIDIHVIIPYEGLSADQMAQIEEVFKVVYPVDDHHFKVILPYGTLVIDGVTPNMLNYFGRPYEGIAVFDGKKITVTGTLWNGNKIIDERLITPDGSMLFRVTINSGSGHHHHHH

SEQ ID NO: 3723 - protein, 457 aa, Synthetic construct
MLHYVDVGPRDGTPVLFLHGNPTSSYVWRNIIPHVAPTHRCIAPDLIGMGKSGKPDLGYFFDDHVRFMDAFIEALGLEEVVLVIHDWGSALGFHWAKRNPERVKGIAFMEFIRPIPDWDEWPEFARETFRAFRTTDVGRKLIIDQNVFIEGTLPMGVVRPLTEVEMDHYREPFLNPVDREPLWRFPNELPIAGEPANIVALVEEYMDWLHQSPVPKLLFWGTPGVLIPPAEAARLAKSLPNCKAVDIGPGLNLLQEDNPDLIGSEIARWLSTLEISGGSGGSGGGGSGGMVFTLEDFVGDWEQTAAYNLDQVLEQGGVSSLLQNLAVSVTPIQRIVRSGENALKIDIHVIIPYEGLSADQMAQIEEVFKVVYPVDDHHFKVILPYGTLVIDGVTPNMLNYFGRPYEGIAVFDGKKITVTGTLWNGNKIIDERLITPDGSMLFRVTINSGSGHHHHHH

SEQ ID NO: 3724 - protein, 457 aa, Synthetic construct
MLHYVDVGPRDGTPVLFLHGNPTSSYVWRNIIPHVAPTHRCIAPDLIGMGKSGKPDLGYFFDDHVRFMDAFIEALGLEEVVLVIHDWGSALGFHWAKRNPERVKGIAFMEFIRPIPDWDEWPEFARETFQRFRTTDVGRKLIIDQNVFIEGTLPMGVVRPLTEVEMDHYREPFLNPVDREPLWRFPNELPIAGEPANIVALVEEYMDWLHQSPVPKLLFWGTPGVLIPPAEAARLAKSLPNCKAVDIGPGLNLLQEDNPDLIGSEIARWLSTLEISGGSGGSGGGGSGGMVFTLEDFVGDWEQTAAYNLDQVLEQGGVSSLLQNLAVSVTPIQRIVRSGENALKIDIHVIIPYEGLSADQMAQIEEVFKVVYPVDDHHFKVILPYGTLVIDGVTPNMLNYFGRPYEGIAVFDGKKITVTGTLWNGNKIIDERLITPDGSMLFRVTINSGSGHHHHHH

SEQ ID NO: 3725 - protein, 457 aa, Synthetic construct
MLHYVDVGPRDGTPVLFLHGNPTSSYVWRNIIPHVAPTHRCIAPDLIGMGKSGKPDLGYFFDDHVRFMDAFIEALGLEEVVLVIHDWGSALGFHWAKRNPERVKGIAFMEFIRPIPDWDEWPEFARETFQAFRTTDVGRELIIDQNVFIEGTLPMGVVRPLTEVEMDHYREPFLNPVDREPLWRFPNELPIAGEPANIVALVEEYMDWLHQSPVPKLLFWGTPGVLIPPAEAARLAKSLPNCKAVDIGPGLNLLQEDNPDLIGSEIARWLSTLEISGGSGGSGGGGSGGMVFTLEDFVGDWEQTAAYNLDQVLEQGGVSSLLQNLAVSVTPIQRIVRSGENALKIDIHVIIPYEGLSADQMAQIEEVFKVVYPVDDHHFKVILPYGTLVIDGVTPNMLNYFGRPYEGIAVFDGKKITVTGTLWNGNKIIDERLITPDGSMLFRVTINSGSGHHHHHH

SEQ ID NO: 3726 - protein, 457 aa, Synthetic construct
MFHYVDVGPRDGTPVLFLHGNPTSSYVWRNIIPHVAPTHRCIAPDLIGMGKSDKPDLGYFFDDHVRFMDAFIEALGLEEVVLVIHDWGSALGFHWAKRNPERVKGIAFMEFIRPIPDWDEWPEFARETFQAFRTTDVGRKLIIDQNVIIEGTLPMGVVRPLTEVEMDHYREPFLNPVDREPLWRFPNELPIAGEPANIVALVEEYMDWLHQSPVPKLLFWGTPGVLIPPAEAARLAKSLPNCKAVDIGPGLNLLQEDNPDLIGSEIARWLSTLEISGGSGGSGGGGSGGMVFTLEDFVGDWEQTAAYNLDQVLEQGGVSSLLQNLAVSVTPIQRIVRSGENALKIDIHVIIPYEGLSADQMAQIEEVFKVVYPVDDHHFKVILPYGTLVIDGVTPNMLNYFGRPYEGIAVFDGKKITVTGTLWNGNKIIDERLITPDGSMLFRVTINSGSGHHHHHH

SEQ ID NO: 3727 - protein, 457 aa, Synthetic construct
MFHYVDVGPRDGTPVLFLHGNPTSSYVWRNIIPHVAPTHRCIAPDLIGMGKSDKPDLGYFFDDHVRFMDAFIEALGLEEVVLVIHDWGSALGFHWAKRNPERVKGIAFMEFIRPIPDWDEWPEFARETFQAFRTTDVGRKLIIDQNVLIEGTLPMGVVRPLTEVEMDHYREPFLNPVDREPLWRFPNELPIAGEPANIVALVEEYMDWLHQSPVPKLLFWGTPGVLIPPAEAARLAKSLPNCKAVDIGPGLNLLQEDNPDLIGSEIARWLSTLEISGGSGGSGGGGSGGMVFTLEDFVGDWEQTAAYNLDQVLEQGGVSSLLQNLAVSVTPIQRIVRSGENALKIDIHVIIPYEGLSADQMAQIEEVFKVVYPVDDHHFKVILPYGTLVIDGVTPNMLNYFGRPYEGIAVFDGKKITVTGTLWNGNKIIDERLITPDGSMLFRVTINSGSGHHHHHH

SEQ ID NO: 3728 - protein, 457 aa, Synthetic construct
MFHYVDVGPRDGTPVLFLHGNPTSSYVWRNIIPHVAPTHRCIAPDLIGMGKSDKPDLGYFFDDHVRFMDAFIEALGLEEVVLVIHDWGSALGFHWAKRNPERVKGIAFMEFIRPIPDWDEWPEFARETFQAFRTTDVGRKLIIDQNVFIEGTLRMGVVRPLTEVEMDHYREPFLNPVDREPLWRFPNELPIAGEPANIVALVEEYMDWLHQSPVPKLLFWGTPGVLIPPAEAARLAKSLPNCKAVDIGPGLNLLQEDNPDLIGSEIARWLSTLEISGGSGGSGGGGSGGMVFTLEDFVGDWEQTAAYNLDQVLEQGGVSSLLQNLAVSVTPIQRIVRSGENALKIDIHVIIPYEGLSADQMAQIEEVFKVVYPVDDHHFKVILPYGTLVIDGVTPNMLNYFGRPYEGIAVFDGKKITVTGTLWNGNKIIDERLITPDGSMLFRVTINSGSGHHHHHH

SEQ ID NO: 3729 - protein, 457 aa, Synthetic construct
MFHYVDVGPRDGTPVLFLHGNPTSSYVWRNIIPHVAPTHRCIAPDLIGMGKSDKPDLGYFFDDHVRFMDAFIEALGLEEVVLVIHDWGSALGFHWAKRNPERVKGIAFMEFIRPIPDWDEWPEFARETFQAFRTTDVGRKLIIDQNVFIEGTLPMGVVRPLTEVEMDHYREPFLNAVDREPLWRFPNELPIAGEPANIVALVEEYMDWLHQSPVPKLLFWGTPGVLIPPAEAARLAKSLPNCKAVDIGPGLNLLQEDNPDLIGSEIARWLSTLEISGGSGGSGGGGSGGMVFTLEDFVGDWEQTAAYNLDQVLEQGGVSSLLQNLAVSVTPIQRIVRSGENALKIDIHVIIPYEGLSADQMAQIEEVFKVVYPVDDHHFKVILPYGTLVIDGVTPNMLNYFGRPYEGIAVFDGKKITVTGTLWNGNKIIDERLITPDGSMLFRVTINSGSGHHHHHH

SEQ ID NO: 3730 - protein, 457 aa, Synthetic construct
MFHYVDVGPRDGTPVLFLHGNPTSSYVWRNIIPHVAPTHRCIAPDLIGMGKSDKPDLGYFFDDHVRFMDAFIEALGLEEVVLVIHDWGSALGFHWAKRNPERVKGIAFMEFIRPIPDWDEWPEFARETFQAFRTTDVGRKLIIDQNVFIEGTLPMGVVRPLTEVEMDHYREPFLNPVDREPLWRWPNELPIAGEPANIVALVEEYMDWLHQSPVPKLLFWGTPGVLIPPAEAARLAKSLPNCKAVDIGPGLNLLQEDNPDLIGSEIARWLSTLEISGGSGGSGGGGSGGMVFTLEDFVGDWEQTAAYNLDQVLEQGGVSSLLQNLAVSVTPIQRIVRSGENALKIDIHVIIPYEGLSADQMAQIEEVFKVVYPVDDHHFKVILPYGTLVIDGVTPNMLNYFGRPYEGIAVFDGKKITVTGTLWNGNKIIDERLITPDGSMLFRVTINSGSGHHHHHH

SEQ ID NO: 3731 - protein, 457 aa, Synthetic construct
MFHYVDVGPRDGTPVLFLHGNPTSSYVWRNIIPHVAPTHRCIAPDLIGMGKSDKPDLGYFFDDHVRFMDAFIEALGLEEVVLVIHDWGSALGFHWAKRNPERVKGIAFMEFIRPIPDWDEWPEFARETFQAFRTTDVGRKLIIDQNVFIEGTLPMGVVRPLTEVEMDHYREPFLNPVDREPLWRFPNELPIGGEPANIVALVEEYMDWLHQSPVPKLLFWGTPGVLIPPAEAARLAKSLPNCKAVDIGPGLNLLQEDNPDLIGSEIARWLSTLEISGGSGGSGGGGSGGMVFTLEDFVGDWEQTAAYNLDQVLEQGGVSSLLQNLAVSVTPIQRIVRSGENALKIDIHVIIPYEGLSADQMAQIEEVFKVVYPVDDHHFKVILPYGTLVIDGVTPNMLNYFGRPYEGIAVFDGKKITVTGTLWNGNKIIDERLITPDGSMLFRVTINSGSGHHHHHH

SEQ ID NO: 3732 - protein, 457 aa, Synthetic construct
MFHYVDVGPRDGTPVLFLHGNPTSSYVWRNIIPHVAPTHRCIAPDLIGMGKSDKPDLGYFFDDHVRFMDAFIEALGLEEVVLVIHDWGSALGFHWAKRNPERVKGIAFMEFIRPIPDWDEWPEFARETFQAFRTTDVGRKLIIDQNVFIEGTLPMGVVRPLTEVEMDHYREPFLNPVDREPLWRFPNELPIAGEPANIVALAEEYMDWLHQSPVPKLLFWGTPGVLIPPAEAARLAKSLPNCKAVDIGPGLNLLQEDNPDLIGSEIARWLSTLEISGGSGGSGGGGSGGMVFTLEDFVGDWEQTAAYNLDQVLEQGGVSSLLQNLAVSVTPIQRIVRSGENALKIDIHVIIPYEGLSADQMAQIEEVFKVVYPVDDHHFKVILPYGTLVIDGVTPNMLNYFGRPYEGIAVFDGKKITVTGTLWNGNKIIDERLITPDGSMLFRVTINSGSGHHHHHH

SEQ ID NO: 3733 - protein, 457 aa, Synthetic construct; identical to SEQ ID NO: 3578

SEQ ID NO: 3734 - protein, 457 aa, Synthetic construct; identical to SEQ ID NO: 3593

SEQ ID NO: 3735 - protein, 457 aa, Synthetic construct; identical to SEQ ID NO: 3608

SEQ ID NO: 3736 - protein, 457 aa, Synthetic construct; identical to SEQ ID NO: 3623

SEQ ID NO: 3737 - protein, 457 aa, Synthetic construct; identical to SEQ ID NO: 3638

SEQ ID NO: 3738 - protein, 457 aa, Synthetic construct
MFHYVDVGPRDGTPVLFLHGNPTSSYVWRNIIPHVAPTHRCIAPDLIGMGKSDKPDLGYFFDDHVRFMDAFIEALGLEEVVLVIHDWGSALGFHWAKRNPERVKGIAFMEFIRPIPTWDEWPEFARKTFRAFRTTDVGRKLIIDQNVFIEGTLPMGVVRPLTEVEMDHYREPFLNPVDREPLWRFPNELPIAGEPANIVALVEEYMDWLHQSPVPKLLFWGTPGVLIPPAEAARLAKSLPNCKAVDIGPGLNLLQEDNPDLIGSEIARWLSTLEISGGSGGSGGGGSGGMVFTLEDFVGDWEQTAAYNLDQVLEQGGVSSLLQNLAVSVTPIQRIVRSGENALKIDIHVIIPYEGLSADQMAQIEEVFKVVYPVDDHHFKVILPYGTLVIDGVTPNMLNYFGRPYEGIAVFDGKKITVTGTLWNGNKIIDERLITPDGSMLFRVTINSGSGHHHHHH

SEQ ID NO: 3739 - protein, 457 aa, Synthetic construct
MFHYVDVGPRDGTPVLFLHGNPTSSYVWRNIIPHVAPTHRCIAPDLIGMGKSDKPDLGYFFDDHVRFMDAFIEALGLEEVVLVIHDWGSALGFHWAKRNPERVKGIAFMEFIRPIPTWDEWPEFARKTFQRFRTTDVGRKLIIDQNVFIEGTLPMGVVRPLTEVEMDHYREPFLNPVDREPLWRFPNELPIAGEPANIVALVEEYMDWLHQSPVPKLLFWGTPGVLIPPAEAARLAKSLPNCKAVDIGPGLNLLQEDNPDLIGSEIARWLSTLEISGGSGGSGGGGSGGMVFTLEDFVGDWEQTAAYNLDQVLEQGGVSSLLQNLAVSVTPIQRIVRSGENALKIDIHVIIPYEGLSADQMAQIEEVFKVVYPVDDHHFKVILPYGTLVIDGVTPNMLNYFGRPYEGIAVFDGKKITVTGTLWNGNKIIDERLITPDGSMLFRVTINSGSGHHHHHH

SEQ ID NO: 3740 - protein, 457 aa, Synthetic construct
MFHYVDVGPRDGTPVLFLHGNPTSSYVWRNIIPHVAPTHRCIAPDLIGMGKSDKPDLGYFFDDHVRFMDAFIEALGLEEVVLVIHDWGSALGFHWAKRNPERVKGIAFMEFIRPIPTWDEWPEFARKTFQAFRTTDVGRELIIDQNVFIEGTLPMGVVRPLTEVEMDHYREPFLNPVDREPLWRFPNELPIAGEPANIVALVEEYMDWLHQSPVPKLLFWGTPGVLIPPAEAARLAKSLPNCKAVDIGPGLNLLQEDNPDLIGSEIARWLSTLEISGGSGGSGGGGSGGMVFTLEDFVGDWEQTAAYNLDQVLEQGGVSSLLQNLAVSVTPIQRIVRSGENALKIDIHVIIPYEGLSADQMAQIEEVFKVVYPVDDHHFKVILPYGTLVIDGVTPNMLNYFGRPYEGIAVFDGKKITVTGTLWNGNKIIDERLITPDGSMLFRVTINSGSGHHHHHH

SEQ ID NO: 3741 - protein, 457 aa, Synthetic construct
MFHYVDVGPRDGTPVLFLHGNPTSSYVWRNIIPHVAPTHRCIAPDLIGMGKSDKPDLGYFFDDHVRFMDAFIEALGLEEVVLVIHDWGSALGFHWAKRNPERVKGIAFMEFIRPIPTWDEWPEFARKTFQAFRTTDVGRKLIIDQNVIIEGTLPMGVVRPLTEVEMDHYREPFLNPVDREPLWRFPNELPIAGEPANIVALVEEYMDWLHQSPVPKLLFWGTPGVLIPPAEAARLAKSLPNCKAVDIGPGLNLLQEDNPDLIGSEIARWLSTLEISGGSGGSGGGGSGGMVFTLEDFVGDWEQTAAYNLDQVLEQGGVSSLLQNLAVSVTPIQRIVRSGENALKIDIHVIIPYEGLSADQMAQIEEVFKVVYPVDDHHFKVILPYGTLVIDGVTPNMLNYFGRPYEGIAVFDGKKITVTGTLWNGNKIIDERLITPDGSMLFRVTINSGSGHHHHHH

SEQ ID NO: 3742 - protein, 457 aa, Synthetic construct
MFHYVDVGPRDGTPVLFLHGNPTSSYVWRNIIPHVAPTHRCIAPDLIGMGKSDKPDLGYFFDDHVRFMDAFIEALGLEEVVLVIHDWGSALGFHWAKRNPERVKGIAFMEFIRPIPTWDEWPEFARKTFQAFRTTDVGRKLIIDQNVLIEGTLPMGVVRPLTEVEMDHYREPFLNPVDREPLWRFPNELPIAGEPANIVALVEEYMDWLHQSPVPKLLFWGTPGVLIPPAEAARLAKSLPNCKAVDIGPGLNLLQEDNPDLIGSEIARWLSTLEISGGSGGSGGGGSGGMVFTLEDFVGDWEQTAAYNLDQVLEQGGVSSLLQNLAVSVTPIQRIVRSGENALKIDIHVIIPYEGLSADQMAQIEEVFKVVYPVDDHHFKVILPYGTLVIDGVTPNMLNYFGRPYEGIAVFDGKKITVTGTLWNGNKIIDERLITPDGSMLFRVTINSGSGHHHHHH

SEQ ID NO: 3743 - protein, 457 aa, Synthetic construct
MFHYVDVGPRDGTPVLFLHGNPTSSYVWRNIIPHVAPTHRCIAPDLIGMGKSDKPDLGYFFDDHVRFMDAFIEALGLEEVVLVIHDWGSALGFHWAKRNPERVKGIAFMEFIRPIPTWDEWPEFARKTFQAFRTTDVGRKLIIDQNVFIEGTLRMGVVRPLTEVEMDHYREPFLNPVDREPLWRFPNELPIAGEPANIVALVEEYMDWLHQSPVPKLLFWGTPGVLIPPAEAARLAKSLPNCKAVDIGPGLNLLQEDNPDLIGSEIARWLSTLEISGGSGGSGGGGSGGMVFTLEDFVGDWEQTAAYNLDQVLEQGGVSSLLQNLAVSVTPIQRIVRSGENALKIDIHVIIPYEGLSADQMAQIEEVFKVVYPVDDHHFKVILPYGTLVIDGVTPNMLNYFGRPYEGIAVFDGKKITVTGTLWNGNKIIDERLITPDGSMLFRVTINSGSGHHHHHH

SEQ ID NO: 3744 - protein, 457 aa, Synthetic construct
MFHYVDVGPRDGTPVLFLHGNPTSSYVWRNIIPHVAPTHRCIAPDLIGMGKSDKPDLGYFFDDHVRFMDAFIEALGLEEVVLVIHDWGSALGFHWAKRNPERVKGIAFMEFIRPIPTWDEWPEFARKTFQAFRTTDVGRKLIIDQNVFIEGTLPMGVVRPLTEVEMDHYREPFLNAVDREPLWRFPNELPIAGEPANIVALVEEYMDWLHQSPVPKLLFWGTPGVLIPPAEAARLAKSLPNCKAVDIGPGLNLLQEDNPDLIGSEIARWLSTLEISGGSGGSGGGGSGGMVFTLEDFVGDWEQTAAYNLDQVLEQGGVSSLLQNLAVSVTPIQRIVRSGENALKIDIHVIIPYEGLSADQMAQIEEVFKVVYPVDDHHFKVILPYGTLVIDGVTPNMLNYFGRPYEGIAVFDGKKITVTGTLWNGNKIIDERLITPDGSMLFRVTINSGSGHHHHHH

SEQ ID NO: 3745 - protein, 457 aa, Synthetic construct
MFHYVDVGPRDGTPVLFLHGNPTSSYVWRNIIPHVAPTHRCIAPDLIGMGKSDKPDLGYFFDDHVRFMDAFIEALGLEEVVLVIHDWGSALGFHWAKRNPERVKGIAFMEFIRPIPTWDEWPEFARKTFQAFRTTDVGRKLIIDQNVFIEGTLPMGVVRPLTEVEMDHYREPFLNPVDREPLWRWPNELPIAGEPANIVALVEEYMDWLHQSPVPKLLFWGTPGVLIPPAEAARLAKSLPNCKAVDIGPGLNLLQEDNPDLIGSEIARWLSTLEISGGSGGSGGGGSGGMVFTLEDFVGDWEQTAAYNLDQVLEQGGVSSLLQNLAVSVTPIQRIVRSGENALKIDIHVIIPYEGLSADQMAQIEEVFKVVYPVDDHHFKVILPYGTLVIDGVTPNMLNYFGRPYEGIAVFDGKKITVTGTLWNGNKIIDERLITPDGSMLFRVTINSGSGHHHHHH

SEQ ID NO: 3746 - protein, 457 aa, Synthetic construct
MFHYVDVGPRDGTPVLFLHGNPTSSYVWRNIIPHVAPTHRCIAPDLIGMGKSDKPDLGYFFDDHVRFMDAFIEALGLEEVVLVIHDWGSALGFHWAKRNPERVKGIAFMEFIRPIPTWDEWPEFARKTFQAFRTTDVGRKLIIDQNVFIEGTLPMGVVRPLTEVEMDHYREPFLNPVDREPLWRFPNELPIGGEPANIVALVEEYMDWLHQSPVPKLLFWGTPGVLIPPAEAARLAKSLPNCKAVDIGPGLNLLQEDNPDLIGSEIARWLSTLEISGGSGGSGGGGSGGMVFTLEDFVGDWEQTAAYNLDQVLEQGGVSSLLQNLAVSVTPIQRIVRSGENALKIDIHVIIPYEGLSADQMAQIEEVFKVVYPVDDHHFKVILPYGTLVIDGVTPNMLNYFGRPYEGIAVFDGKKITVTGTLWNGNKIIDERLITPDGSMLFRVTINSGSGHHHHHH

SEQ ID NO: 3747 - protein, 457 aa, Synthetic construct
MFHYVDVGPRDGTPVLFLHGNPTSSYVWRNIIPHVAPTHRCIAPDLIGMGKSDKPDLGYFFDDHVRFMDAFIEALGLEEVVLVIHDWGSALGFHWAKRNPERVKGIAFMEFIRPIPTWDEWPEFARKTFQAFRTTDVGRKLIIDQNVFIEGTLPMGVVRPLTEVEMDHYREPFLNPVDREPLWRFPNELPIAGEPANIVALAEEYMDWLHQSPVPKLLFWGTPGVLIPPAEAARLAKSLPNCKAVDIGPGLNLLQEDNPDLIGSEIARWLSTLEISGGSGGSGGGGSGGMVFTLEDFVGDWEQTAAYNLDQVLEQGGVSSLLQNLAVSVTPIQRIVRSGENALKIDIHVIIPYEGLSADQMAQIEEVFKVVYPVDDHHFKVILPYGTLVIDGVTPNMLNYFGRPYEGIAVFDGKKITVTGTLWNGNKIIDERLITPDGSMLFRVTINSGSGHHHHHH

SEQ ID NO: 3748 - protein, 457 aa, Synthetic construct; identical to SEQ ID NO: 3579

SEQ ID NO: 3749 - protein, 457 aa, Synthetic construct; identical to SEQ ID NO: 3594

SEQ ID NO: 3750 - protein, 457 aa, Synthetic construct; identical to SEQ ID NO: 3609

SEQ ID NO: 3751 - protein, 457 aa, Synthetic construct; identical to SEQ ID NO: 3624

SEQ ID NO: 3752 - protein, 457 aa, Synthetic construct; identical to SEQ ID NO: 3639

SEQ ID NO: 3753 - protein, 457 aa, Synthetic construct; identical to SEQ ID NO: 3738

SEQ ID NO: 3754 - protein, 457 aa, Synthetic construct
MFHYVDVGPRDGTPVLFLHGNPTSSYVWRNIIPHVAPTHRCIAPDLIGMGKSDKPDLGYFFDDHVRFMDAFIEALGLEEVVLVIHDWGSALGFHWAKRNPERVKGIAFMEFIRPIPTWDEWPEFARETFRRFRTTDVGRKLIIDQNVFIEGTLPMGVVRPLTEVEMDHYREPFLNPVDREPLWRFPNELPIAGEPANIVALVEEYMDWLHQSPVPKLLFWGTPGVLIPPAEAARLAKSLPNCKAVDIGPGLNLLQEDNPDLIGSEIARWLSTLEISGGSGGSGGGGSGGMVFTLEDFVGDWEQTAAYNLDQVLEQGGVSSLLQNLAVSVTPIQRIVRSGENALKIDIHVIIPYEGLSADQMAQIEEVFKVVYPVDDHHFKVILPYGTLVIDGVTPNMLNYFGRPYEGIAVFDGKKITVTGTLWNGNKIIDERLITPDGSMLFRVTINSGSGHHHHHH

SEQ ID NO: 3755 - protein, 457 aa, Synthetic construct
MFHYVDVGPRDGTPVLFLHGNPTSSYVWRNIIPHVAPTHRCIAPDLIGMGKSDKPDLGYFFDDHVRFMDAFIEALGLEEVVLVIHDWGSALGFHWAKRNPERVKGIAFMEFIRPIPTWDEWPEFARETFRAFRTTDVGRELIIDQNVFIEGTLPMGVVRPLTEVEMDHYREPFLNPVDREPLWRFPNELPIAGEPANIVALVEEYMDWLHQSPVPKLLFWGTPGVLIPPAEAARLAKSLPNCKAVDIGPGLNLLQEDNPDLIGSEIARWLSTLEISGGSGGSGGGGSGGMVFTLEDFVGDWEQTAAYNLDQVLEQGGVSSLLQNLAVSVTPIQRIVRSGENALKIDIHVIIPYEGLSADQMAQIEEVFKVVYPVDDHHFKVILPYGTLVIDGVTPNMLNYFGRPYEGIAVFDGKKITVTGTLWNGNKIIDERLITPDGSMLFRVTINSGSGHHHHHH

SEQ ID NO: 3756 - protein, 457 aa, Synthetic construct
MFHYVDVGPRDGTPVLFLHGNPTSSYVWRNIIPHVAPTHRCIAPDLIGMGKSDKPDLGYFFDDHVRFMDAFIEALGLEEVVLVIHDWGSALGFHWAKRNPERVKGIAFMEFIRPIPTWDEWPEFARETFRAFRTTDVGRKLIIDQNVIIEGTLPMGVVRPLTEVEMDHYREPFLNPVDREPLWRFPNELPIAGEPANIVALVEEYMDWLHQSPVPKLLFWGTPGVLIPPAEAARLAKSLPNCKAVDIGPGLNLLQEDNPDLIGSEIARWLSTLEISGGSGGSGGGGSGGMVFTLEDFVGDWEQTAAYNLDQVLEQGGVSSLLQNLAVSVTPIQRIVRSGENALKIDIHVIIPYEGLSADQMAQIEEVFKVVYPVDDHHFKVILPYGTLVIDGVTPNMLNYFGRPYEGIAVFDGKKITVTGTLWNGNKIIDERLITPDGSMLFRVTINSGSGHHHHHH

SEQ ID NO: 3757 - protein, 457 aa, Synthetic construct
MFHYVDVGPRDGTPVLFLHGNPTSSYVWRNIIPHVAPTHRCIAPDLIGMGKSDKPDLGYFFDDHVRFMDAFIEALGLEEVVLVIHDWGSALGFHWAKRNPERVKGIAFMEFIRPIPTWDEWPEFARETFRAFRTTDVGRKLIIDQNVLIEGTLPMGVVRPLTEVEMDHYREPFLNPVDREPLWRFPNELPIAGEPANIVALVEEYMDWLHQSPVPKLLFWGTPGVLIPPAEAARLAKSLPNCKAVDIGPGLNLLQEDNPDLIGSEIARWLSTLEISGGSGGSGGGGSGGMVFTLEDFVGDWEQTAAYNLDQVLEQGGVSSLLQNLAVSVTPIQRIVRSGENALKIDIHVIIPYEGLSADQMAQIEEVFKVVYPVDDHHFKVILPYGTLVIDGVTPNMLNYFGRPYEGIAVFDGKKITVTGTLWNGNKIIDERLITPDGSMLFRVTINSGSGHHHHHH

SEQ ID NO: 3758 - protein, 457 aa, Synthetic construct
MFHYVDVGPRDGTPVLFLHGNPTSSYVWRNIIPHVAPTHRCIAPDLIGMGKSDKPDLGYFFDDHVRFMDAFIEALGLEEVVLVIHDWGSALGFHWAKRNPERVKGIAFMEFIRPIPTWDEWPEFARETFRAFRTTDVGRKLIIDQNVFIEGTLRMGVVRPLTEVEMDHYREPFLNPVDREPLWRFPNELPIAGEPANIVALVEEYMDWLHQSPVPKLLFWGTPGVLIPPAEAARLAKSLPNCKAVDIGPGLNLLQEDNPDLIGSEIARWLSTLEISGGSGGSGGGGSGGMVFTLEDFVGDWEQTAAYNLDQVLEQGGVSSLLQNLAVSVTPIQRIVRSGENALKIDIHVIIPYEGLSADQMAQIEEVFKVVYPVDDHHFKVILPYGTLVIDGVTPNMLNYFGRPYEGIAVFDGKKITVTGTLWNGNKIIDERLITPDGSMLFRVTINSGSGHHHHHH

SEQ ID NO: 3759 - protein, 457 aa, Synthetic construct
MFHYVDVGPRDGTPVLFLHGNPTSSYVWRNIIPHVAPTHRCIAPDLIGMGKSDKPDLGYFFDDHVRFMDAFIEALGLEEVVLVIHDWGSALGFHWAKRNPERVKGIAFMEFIRPIPTWDEWPEFARETFRAFRTTDVGRKLIIDQNVFIEGTLPMGVVRPLTEVEMDHYREPFLNAVDREPLWRFPNELPIAGEPANIVALVEEYMDWLHQSPVPKLLFWGTPGVLIPPAEAARLAKSLPNCKAVDIGPGLNLLQEDNPDLIGSEIARWLSTLEISGGSGGSGGGGSGGMVFTLEDFVGDWEQTAAYNLDQVLEQGGVSSLLQNLAVSVTPIQRIVRSGENALKIDIHVIIPYEGLSADQMAQIEEVFKVVYPVDDHHFKVILPYGTLVIDGVTPNMLNYFGRPYEGIAVFDGKKITVTGTLWNGNKIIDERLITPDGSMLFRVTINSGSGHHHHHH

SEQ ID NO: 3760 - protein, 457 aa, Synthetic construct
MFHYVDVGPRDGTPVLFLHGNPTSSYVWRNIIPHVAPTHRCIAPDLIGMGKSDKPDLGYFFDDHVRFMDAFIEALGLEEVVLVIHDWGSALGFHWAKRNPERVKGIAFMEFIRPIPTWDEWPEFARETFRAFRTTDVGRKLIIDQNVFIEGTLPMGVVRPLTEVEMDHYREPFLNPVDREPLWRWPNELPIAGEPANIVALVEEYMDWLHQSPVPKLLFWGTPGVLIPPAEAARLAKSLPNCKAVDIGPGLNLLQEDNPDLIGSEIARWLSTLEISGGSGGSGGGGSGGMVFTLEDFVGDWEQTAAYNLDQVLEQGGVSSLLQNLAVSVTPIQRIVRSGENALKIDIHVIIPYEGLSADQMAQIEEVFKVVYPVDDHHFKVILPYGTLVIDGVTPNMLNYFGRPYEGIAVFDGKKITVTGTLWNGNKIIDERLITPDGSMLFRVTINSGSGHHHHHH

SEQ ID NO: 3761 - protein, 457 aa, Synthetic construct
MFHYVDVGPRDGTPVLFLHGNPTSSYVWRNIIPHVAPTHRCIAPDLIGMGKSDKPDLGYFFDDHVRFMDAFIEALGLEEVVLVIHDWGSALGFHWAKRNPERVKGIAFMEFIRPIPTWDEWPEFARETFRAFRTTDVGRKLIIDQNVFIEGTLPMGVVRPLTEVEMDHYREPFLNPVDREPLWRFPNELPIGGEPANIVALVEEYMDWLHQSPVPKLLFWGTPGVLIPPAEAARLAKSLPNCKAVDIGPGLNLLQEDNPDLIGSEIARWLSTLEISGGSGGSGGGGSGGMVFTLEDFVGDWEQTAAYNLDQVLEQGGVSSLLQNLAVSVTPIQRIVRSGENALKIDIHVIIPYEGLSADQMAQIEEVFKVVYPVDDHHFKVILPYGTLVIDGVTPNMLNYFGRPYEGIAVFDGKKITVTGTLWNGNKIIDERLITPDGSMLFRVTINSGSGHHHHHH

SEQ ID NO: 3762 - protein, 457 aa, Synthetic construct
MFHYVDVGPRDGTPVLFLHGNPTSSYVWRNIIPHVAPTHRCIAPDLIGMGKSDKPDLGYFFDDHVRFMDAFIEALGLEEVVLVIHDWGSALGFHWAKRNPERVKGIAFMEFIRPIPTWDEWPEFARETFRAFRTTDVGRKLIIDQNVFIEGTLPMGVVRPLTEVEMDHYREPFLNPVDREPLWRFPNELPIAGEPANIVALAEEYMDWLHQSPVPKLLFWGTPGVLIPPAEAARLAKSLPNCKAVDIGPGLNLLQEDNPDLIGSEIARWLSTLEISGGSGGSGGGGSGGMVFTLEDFVGDWEQTAAYNLDQVLEQGGVSSLLQNLAVSVTPIQRIVRSGENALKIDIHVIIPYEGLSADQMAQIEEVFKVVYPVDDHHFKVILPYGTLVIDGVTPNMLNYFGRPYEGIAVFDGKKITVTGTLWNGNKIIDERLITPDGSMLFRVTINSGSGHHHHHH

SEQ ID NO: 3763 - protein, 457 aa, Synthetic construct; identical to SEQ ID NO: 3580

SEQ ID NO: 3764 - protein, 457 aa, Synthetic construct; identical to SEQ ID NO: 3595

SEQ ID NO: 3765 - protein, 457 aa, Synthetic construct; identical to SEQ ID NO: 3610

SEQ ID NO: 3766 - protein, 457 aa, Synthetic construct; identical to SEQ ID NO: 3625

SEQ ID NO: 3767 - protein, 457 aa, Synthetic construct; identical to SEQ ID NO: 3640

SEQ ID NO: 3768 - protein, 457 aa, Synthetic construct; identical to SEQ ID NO: 3739

SEQ ID NO: 3769 - protein, 457 aa, Synthetic construct; identical to SEQ ID NO: 3754

SEQ ID NO: 3770 - protein, 457 aa, Synthetic construct
MFHYVDVGPRDGTPVLFLHGNPTSSYVWRNIIPHVAPTHRCIAPDLIGMGKSDKPDLGYFFDDHVRFMDAFIEALGLEEVVLVIHDWGSALGFHWAKRNPERVKGIAFMEFIRPIPTWDEWPEFARETFQRFRTTDVGRELIIDQNVFIEGTLPMGVVRPLTEVEMDHYREPFLNPVDREPLWRFPNELPIAGEPANIVALVEEYMDWLHQSPVPKLLFWGTPGVLIPPAEAARLAKSLPNCKAVDIGPGLNLLQEDNPDLIGSEIARWLSTLEISGGSGGSGGGGSGGMVFTLEDFVGDWEQTAAYNLDQVLEQGGVSSLLQNLAVSVTPIQRIVRSGENALKIDIHVIIPYEGLSADQMAQIEEVFKVVYPVDDHHFKVILPYGTLVIDGVTPNMLNYFGRPYEGIAVFDGKKITVTGTLWNGNKIIDERLITPDGSMLFRVTINSGSGHHHHHH

SEQ ID NO: 3771 - protein, 457 aa, Synthetic construct
MFHYVDVGPRDGTPVLFLHGNPTSSYVWRNIIPHVAPTHRCIAPDLIGMGKSDKPDLGYFFDDHVRFMDAFIEALGLEEVVLVIHDWGSALGFHWAKRNPERVKGIAFMEFIRPIPTWDEWPEFARETFQRFRTTDVGRKLIIDQNVIIEGTLPMGVVRPLTEVEMDHYREPFLNPVDREPLWRFPNELPIAGEPANIVALVEEYMDWLHQSPVPKLLFWGTPGVLIPPAEAARLAKSLPNCKAVDIGPGLNLLQEDNPDLIGSEIARWLSTLEISGGSGGSGGGGSGGMVFTLEDFVGDWEQTAAYNLDQVLEQGGVSSLLQNLAVSVTPIQRIVRSGENALKIDIHVIIPYEGLSADQMAQIEEVFKVVYPVDDHHFKVILPYGTLVIDGVTPNMLNYFGRPYEGIAVFDGKKITVTGTLWNGNKIIDERLITPDGSMLFRVTINSGSGHHHHHH

SEQ ID NO: 3772 - protein, 457 aa, Synthetic construct
MFHYVDVGPRDGTPVLFLHGNPTSSYVWRNIIPHVAPTHRCIAPDLIGMGKSDKPDLGYFFDDHVRFMDAFIEALGLEEVVLVIHDWGSALGFHWAKRNPERVKGIAFMEFIRPIPTWDEWPEFARETFQRFRTTDVGRKLIIDQNVLIEGTLPMGVVRPLTEVEMDHYREPFLNPVDREPLWRFPNELPIAGEPANIVALVEEYMDWLHQSPVPKLLFWGTPGVLIPPAEAARLAKSLPNCKAVDIGPGLNLLQEDNPDLIGSEIARWLSTLEISGGSGGSGGGGSGGMVFTLEDFVGDWEQTAAYNLDQVLEQGGVSSLLQNLAVSVTPIQRIVRSGENALKIDIHVIIPYEGLSADQMAQIEEVFKVVYPVDDHHFKVILPYGTLVIDGVTPNMLNYFGRPYEGIAVFDGKKITVTGTLWNGNKIIDERLITPDGSMLFRVTINSGSGHHHHHH

SEQ ID NO: 3773 - protein, 457 aa, Synthetic construct
MFHYVDVGPRDGTPVLFLHGNPTSSYVWRNIIPHVAPTHRCIAPDLIGMGKSDKPDLGYFFDDHVRFMDAFIEALGLEEVVLVIHDWGSALGFHWAKRNPERVKGIAFMEFIRPIPTWDEWPEFARETFQRFRTTDVGRKLIIDQNVFIEGTLRMGVVRPLTEVEMDHYREPFLNPVDREPLWRFPNELPIAGEPANIVALVEEYMDWLHQSPVPKLLFWGTPGVLIPPAEAARLAKSLPNCKAVDIGPGLNLLQEDNPDLIGSEIARWLSTLEISGGSGGSGGGGSGGMVFTLEDFVGDWEQTAAYNLDQVLEQGGVSSLLQNLAVSVTPIQRIVRSGENALKIDIHVIIPYEGLSADQMAQIEEVFKVVYPVDDHHFKVILPYGTLVIDGVTPNMLNYFGRPYEGIAVFDGKKITVTGTLWNGNKIIDERLITPDGSMLFRVTINSGSGHHHHHH

SEQ ID NO: 3774 - protein, 457 aa, Synthetic construct
MFHYVDVGPRDGTPVLFLHGNPTSSYVWRNIIPHVAPTHRCIAPDLIGMGKSDKPDLGYFFDDHVRFMDAFIEALGLEEVVLVIHDWGSALGFHWAKRNPERVKGIAFMEFIRPIPTWDEWPEFARETFQRFRTTDVGRKLIIDQNVFIEGTLPMGVVRPLTEVEMDHYREPFLNAVDREPLWRFPNELPIAGEPANIVALVEEYMDWLHQSPVPKLLFWGTPGVLIPPAEAARLAKSLPNCKAVDIGPGLNLLQEDNPDLIGSEIARWLSTLEISGGSGGSGGGGSGGMVFTLEDFVGDWEQTAAYNLDQVLEQGGVSSLLQNLAVSVTPIQRIVRSGENALKIDIHVIIPYEGLSADQMAQIEEVFKVVYPVDDHHFKVILPYGTLVIDGVTPNMLNYFGRPYEGIAVFDGKKITVTGTLWNGNKIIDERLITPDGSMLFRVTINSGSGHHHHHH

SEQ ID NO: 3775 - protein, 457 aa, Synthetic construct
MFHYVDVGPRDGTPVLFLHGNPTSSYVWRNIIPHVAPTHRCIAPDLIGMGKSDKPDLGYFFDDHVRFMDAFIEALGLEEVVLVIHDWGSALGFHWAKRNPERVKGIAFMEFIRPIPTWDEWPEFARETFQRFRTTDVGRKLIIDQNVFIEGTLPMGVVRPLTEVEMDHYREPFLNPVDREPLWRWPNELPIAGEPANIVALVEEYMDWLHQSPVPKLLFWGTPGVLIPPAEAARLAKSLPNCKAVDIGPGLNLLQEDNPDLIGSEIARWLSTLEISGGSGGSGGGGSGGMVFTLEDFVGDWEQTAAYNLDQVLEQGGVSSLLQNLAVSVTPIQRIVRSGENALKIDIHVIIPYEGLSADQMAQIEEVFKVVYPVDDHHFKVILPYGTLVIDGVTPNMLNYFGRPYEGIAVFDGKKITVTGTLWNGNKIIDERLITPDGSMLFRVTINSGSGHHHHHH

SEQ ID NO: 3776 - protein, 457 aa, Synthetic construct
MFHYVDVGPRDGTPVLFLHGNPTSSYVWRNIIPHVAPTHRCIAPDLIGMGKSDKPDLGYFFDDHVRFMDAFIEALGLEEVVLVIHDWGSALGFHWAKRNPERVKGIAFMEFIRPIPTWDEWPEFARETFQRFRTTDVGRKLIIDQNVFIEGTLPMGVVRPLTEVEMDHYREPFLNPVDREPLWRFPNELPIGGEPANIVALVEEYMDWLHQSPVPKLLFWGTPGVLIPPAEAARLAKSLPNCKAVDIGPGLNLLQEDNPDLIGSEIARWLSTLEISGGSGGSGGGGSGGMVFTLEDFVGDWEQTAAYNLDQVLEQGGVSSLLQNLAVSVTPIQRIVRSGENALKIDIHVIIPYEGLSADQMAQIEEVFKVVYPVDDHHFKVILPYGTLVIDGVTPNMLNYFGRPYEGIAVFDGKKITVTGTLWNGNKIIDERLITPDGSMLFRVTINSGSGHHHHHH

SEQ ID NO: 3777 - protein, 457 aa, Synthetic construct
MFHYVDVGPRDGTPVLFLHGNPTSSYVWRNIIPHVAPTHRCIAPDLIGMGKSDKPDLGYFFDDHVRFMDAFIEALGLEEVVLVIHDWGSALGFHWAKRNPERVKGIAFMEFIRPIPTWDEWPEFARETFQRFRTTDVGRKLIIDQNVFIEGTLPMGVVRPLTEVEMDHYREPFLNPVDREPLWRFPNELPIAGEPANIVALAEEYMDWLHQSPVPKLLFWGTPGVLIPPAEAARLAKSLPNCKAVDIGPGLNLLQEDNPDLIGSEIARWLSTLEISGGSGGSGGGGSGGMVFTLEDFVGDWEQTAAYNLDQVLEQGGVSSLLQNLAVSVTPIQRIVRSGENALKIDIHVIIPYEGLSADQMAQIEEVFKVVYPVDDHHFKVILPYGTLVIDGVTPNMLNYFGRPYEGIAVFDGKKITVTGTLWNGNKIIDERLITPDGSMLFRVTINSGSGHHHHHH

SEQ ID NO: 3778 - protein, 457 aa, Synthetic construct; identical to SEQ ID NO: 3581

SEQ ID NO: 3779 - protein, 457 aa, Synthetic construct; identical to SEQ ID NO: 3596

SEQ ID NO: 3780 - protein, 457 aa, Synthetic construct; identical to SEQ ID NO: 3611

SEQ ID NO: 3781 - protein, 457 aa, Synthetic construct; identical to SEQ ID NO: 3626

SEQ ID NO: 3782 - protein, 457 aa, Synthetic construct; identical to SEQ ID NO: 3641

SEQ ID NO: 3783 - protein, 457 aa, Synthetic construct; identical to SEQ ID NO: 3740

SEQ ID NO: 3784 - protein, 457 aa, Synthetic construct; identical to SEQ ID NO: 3755

SEQ ID NO: 3785 - protein, 457 aa, Synthetic construct; identical to SEQ ID NO: 3770

SEQ ID NO: 3786 - protein, 457 aa, Synthetic construct
MFHYVDVGPRDGTPVLFLHGNPTSSYVWRNIIPHVAPTHRCIAPDLIGMGKSDKPDLGYFFDDHVRFMDAFIEALGLEEVVLVIHDWGSALGFHWAKRNPERVKGIAFMEFIRPIPTWDEWPEFARETFQAFRTTDVGRELIIDQNVIIEGTLPMGVVRPLTEVEMDHYREPFLNPVDREPLWRFPNELPIAGEPANIVALVEEYMDWLHQSPVPKLLFWGTPGVLIPPAEAARLAKSLPNCKAVDIGPGLNLLQEDNPDLIGSEIARWLSTLEISGGSGGSGGGGSGGMVFTLEDFVGDWEQTAAYNLDQVLEQGGVSSLLQNLAVSVTPIQRIVRSGENALKIDIHVIIPYEGLSADQMAQIEEVFKVVYPVDDHHFKVILPYGTLVIDGVTPNMLNYFGRPYEGIAVFDGKKITVTGTLWNGNKIIDERLITPDGSMLFRVTINSGSGHHHHHH

SEQ ID NO: 3787 - protein, 457 aa, Synthetic construct
MFHYVDVGPRDGTPVLFLHGNPTSSYVWRNIIPHVAPTHRCIAPDLIGMGKSDKPDLGYFFDDHVRFMDAFIEALGLEEVVLVIHDWGSALGFHWAKRNPERVKGIAFMEFIRPIPTWDEWPEFARETFQAFRTTDVGRELIIDQNVLIEGTLPMGVVRPLTEVEMDHYREPFLNPVDREPLWRFPNELPIAGEPANIVALVEEYMDWLHQSPVPKLLFWGTPGVLIPPAEAARLAKSLPNCKAVDIGPGLNLLQEDNPDLIGSEIARWLSTLEISGGSGGSGGGGSGGMVFTLEDFVGDWEQTAAYNLDQVLEQGGVSSLLQNLAVSVTPIQRIVRSGENALKIDIHVIIPYEGLSADQMAQIEEVFKVVYPVDDHHFKVILPYGTLVIDGVTPNMLNYFGRPYEGIAVFDGKKITVTGTLWNGNKIIDERLITPDGSMLFRVTINSGSGHHHHHH

SEQ ID NO: 3788 - protein, 457 aa, Synthetic construct
MFHYVDVGPRDGTPVLFLHGNPTSSYVWRNIIPHVAPTHRCIAPDLIGMGKSDKPDLGYFFDDHVRFMDAFIEALGLEEVVLVIHDWGSALGFHWAKRNPERVKGIAFMEFIRPIPTWDEWPEFARETFQAFRTTDVGRELIIDQNVFIEGTLRMGVVRPLTEVEMDHYREPFLNPVDREPLWRFPNELPIAGEPANIVALVEEYMDWLHQSPVPKLLFWGTPGVLIPPAEAARLAKSLPNCKAVDIGPGLNLLQEDNPDLIGSEIARWLSTLEISGGSGGSGGGGSGGMVFTLEDFVGDWEQTAAYNLDQVLEQGGVSSLLQNLAVSVTPIQRIVRSGENALKIDIHVIIPYEGLSADQMAQIEEVFKVVYPVDDHHFKVILPYGTLVIDGVTPNMLNYFGRPYEGIAVFDGKKITVTGTLWNGNKIIDERLITPDGSMLFRVTINSGSGHHHHHH

SEQ ID NO: 3789 - protein, 457 aa, Synthetic construct
MFHYVDVGPRDGTPVLFLHGNPTSSYVWRNIIPHVAPTHRCIAPDLIGMGKSDKPDLGYFFDDHVRFMDAFIEALGLEEVVLVIHDWGSALGFHWAKRNPERVKGIAFMEFIRPIPTWDEWPEFARETFQAFRTTDVGRELIIDQNVFIEGTLPMGVVRPLTEVEMDHYREPFLNAVDREPLWRFPNELPIAGEPANIVALVEEYMDWLHQSPVPKLLFWGTPGVLIPPAEAARLAKSLPNCKAVDIGPGLNLLQEDNPDLIGSEIARWLSTLEISGGSGGSGGGGSGGMVFTLEDFVGDWEQTAAYNLDQVLEQGGVSSLLQNLAVSVTPIQRIVRSGENALKIDIHVIIPYEGLSADQMAQIEEVFKVVYPVDDHHFKVILPYGTLVIDGVTPNMLNYFGRPYEGIAVFDGKKITVTGTLWNGNKIIDERLITPDGSMLFRVTINSGSGHHHHHH

SEQ ID NO: 3790 - protein, 457 aa, Synthetic construct
MFHYVDVGPRDGTPVLFLHGNPTSSYVWRNIIPHVAPTHRCIAPDLIGMGKSDKPDLGYFFDDHVRFMDAFIEALGLEEVVLVIHDWGSALGFHWAKRNPERVKGIAFMEFIRPIPTWDEWPEFARETFQAFRTTDVGRELIIDQNVFIEGTLPMGVVRPLTEVEMDHYREPFLNPVDREPLWRWPNELPIAGEPANIVALVEEYMDWLHQSPVPKLLFWGTPGVLIPPAEAARLAKSLPNCKAVDIGPGLNLLQEDNPDLIGSEIARWLSTLEISGGSGGSGGGGSGGMVFTLEDFVGDWEQTAAYNLDQVLEQGGVSSLLQNLAVSVTPIQRIVRSGENALKIDIHVIIPYEGLSADQMAQIEEVFKVVYPVDDHHFKVILPYGTLVIDGVTPNMLNYFGRPYEGIAVFDGKKITVTGTLWNGNKIIDERLITPDGSMLFRVTINSGSGHHHHHH

SEQ ID NO: 3791 - protein, 457 aa, Synthetic construct
MFHYVDVGPRDGTPVLFLHGNPTSSYVWRNIIPHVAPTHRCIAPDLIGMGKSDKPDLGYFFDDHVRFMDAFIEALGLEEVVLVIHDWGSALGFHWAKRNPERVKGIAFMEFIRPIPTWDEWPEFARETFQAFRTTDVGRELIIDQNVFIEGTLPMGVVRPLTEVEMDHYREPFLNPVDREPLWRFPNELPIGGEPANIVALVEEYMDWLHQSPVPKLLFWGTPGVLIPPAEAARLAKSLPNCKAVDIGPGLNLLQEDNPDLIGSEIARWLSTLEISGGSGGSGGGGSGGMVFTLEDFVGDWEQTAAYNLDQVLEQGGVSSLLQNLAVSVTPIQRIVRSGENALKIDIHVIIPYEGLSADQMAQIEEVFKVVYPVDDHHFKVILPYGTLVIDGVTPNMLNYFGRPYEGIAVFDGKKITVTGTLWNGNKIIDERLITPDGSMLFRVTINSGSGHHHHHH

SEQ ID NO: 3792 - protein, 457 aa, Synthetic construct
MFHYVDVGPRDGTPVLFLHGNPTSSYVWRNIIPHVAPTHRCIAPDLIGMGKSDKPDLGYFFDDHVRFMDAFIEALGLEEVVLVIHDWGSALGFHWAKRNPERVKGIAFMEFIRPIPTWDEWPEFARETFQAFRTTDVGRELIIDQNVFIEGTLPMGVVRPLTEVEMDHYREPFLNPVDREPLWRFPNELPIAGEPANIVALAEEYMDWLHQSPVPKLLFWGTPGVLIPPAEAARLAKSLPNCKAVDIGPGLNLLQEDNPDLIGSEIARWLSTLEISGGSGGSGGGGSGGMVFTLEDFVGDWEQTAAYNLDQVLEQGGVSSLLQNLAVSVTPIQRIVRSGENALKIDIHVIIPYEGLSADQMAQIEEVFKVVYPVDDHHFKVILPYGTLVIDGVTPNMLNYFGRPYEGIAVFDGKKITVTGTLWNGNKIIDERLITPDGSMLFRVTINSGSGHHHHHH

SEQ ID NO: 3793 - protein, 457 aa, Synthetic construct; identical to SEQ ID NO: 3582

SEQ ID NO: 3794 - protein, 457 aa, Synthetic construct; identical to SEQ ID NO: 3597

SEQ ID NO: 3795 - protein, 457 aa, Synthetic construct; identical to SEQ ID NO: 3612

SEQ ID NO: 3796 - protein, 457 aa, Synthetic construct; identical to SEQ ID NO: 3627

SEQ ID NO: 3797 - protein, 457 aa, Synthetic construct; identical to SEQ ID NO: 3726

SEQ ID NO: 3798 - protein, 457 aa, Synthetic construct; identical to SEQ ID NO: 3741

SEQ ID NO: 3799 - protein, 457 aa, Synthetic construct; identical to SEQ ID NO: 3756

SEQ ID NO: 3800 - protein, 457 aa, Synthetic construct; identical to SEQ ID NO: 3771

SEQ ID NO: 3801 - protein, 457 aa, Synthetic construct; identical to SEQ ID NO: 3786

SEQ ID NO: 3802 - protein, 457 aa, Synthetic construct
MFHYVDVGPRDGTPVLFLHGNPTSSYVWRNIIPHVAPTHRCIAPDLIGMGKSDKPDLGYFFDDHVRFMDAFIEALGLEEVVLVIHDWGSALGFHWAKRNPERVKGIAFMEFIRPIPTWDEWPEFARETFQAFRTTDVGRKLIIDQNVIIEGTLRMGVVRPLTEVEMDHYREPFLNPVDREPLWRFPNELPIAGEPANIVALVEEYMDWLHQSPVPKLLFWGTPGVLIPPAEAARLAKSLPNCKAVDIGPGLNLLQEDNPDLIGSEIARWLSTLEISGGSGGSGGGGSGGMVFTLEDFVGDWEQTAAYNLDQVLEQGGVSSLLQNLAVSVTPIQRIVRSGENALKIDIHVIIPYEGLSADQMAQIEEVFKVVYPVDDHHFKVILPYGTLVIDGVTPNMLNYFGRPYEGIAVFDGKKITVTGTLWNGNKIIDERLITPDGSMLFRVTINSGSGHHHHHH

SEQ ID NO: 3803 - protein, 457 aa, Synthetic construct
MFHYVDVGPRDGTPVLFLHGNPTSSYVWRNIIPHVAPTHRCIAPDLIGMGKSDKPDLGYFFDDHVRFMDAFIEALGLEEVVLVIHDWGSALGFHWAKRNPERVKGIAFMEFIRPIPTWDEWPEFARETFQAFRTTDVGRKLIIDQNVIIEGTLPMGVVRPLTEVEMDHYREPFLNAVDREPLWRFPNELPIAGEPANIVALVEEYMDWLHQSPVPKLLFWGTPGVLIPPAEAARLAKSLPNCKAVDIGPGLNLLQEDNPDLIGSEIARWLSTLEISGGSGGSGGGGSGGMVFTLEDFVGDWEQTAAYNLDQVLEQGGVSSLLQNLAVSVTPIQRIVRSGENALKIDIHVIIPYEGLSADQMAQIEEVFKVVYPVDDHHFKVILPYGTLVIDGVTPNMLNYFGRPYEGIAVFDGKKITVTGTLWNGNKIIDERLITPDGSMLFRVTINSGSGHHHHHH

SEQ ID NO: 3804 - protein, 457 aa, Synthetic construct
MFHYVDVGPRDGTPVLFLHGNPTSSYVWRNIIPHVAPTHRCIAPDLIGMGKSDKPDLGYFFDDHVRFMDAFIEALGLEEVVLVIHDWGSALGFHWAKRNPERVKGIAFMEFIRPIPTWDEWPEFARETFQAFRTTDVGRKLIIDQNVIIEGTLPMGVVRPLTEVEMDHYREPFLNPVDREPLWRWPNELPIAGEPANIVALVEEYMDWLHQSPVPKLLFWGTPGVLIPPAEAARLAKSLPNCKAVDIGPGLNLLQEDNPDLIGSEIARWLSTLEISGGSGGSGGGGSGGMVFTLEDFVGDWEQTAAYNLDQVLEQGGVSSLLQNLAVSVTPIQRIVRSGENALKIDIHVIIPYEGLSADQMAQIEEVFKVVYPVDDHHFKVILPYGTLVIDGVTPNMLNYFGRPYEGIAVFDGKKITVTGTLWNGNKIIDERLITPDGSMLFRVTINSGSGHHHHHH

SEQ ID NO: 3805 - protein, 457 aa, Synthetic construct
MFHYVDVGPRDGTPVLFLHGNPTSSYVWRNIIPHVAPTHRCIAPDLIGMGKSDKPDLGYFFDDHVRFMDAFIEALGLEEVVLVIHDWGSALGFHWAKRNPERVKGIAFMEFIRPIPTWDEWPEFARETFQAFRTTDVGRKLIIDQNVIIEGTLPMGVVRPLTEVEMDHYREPFLNPVDREPLWRFPNELPIGGEPANIVALVEEYMDWLHQSPVPKLLFWGTPGVLIPPAEAARLAKSLPNCKAVDIGPGLNLLQEDNPDLIGSEIARWLSTLEISGGSGGSGGGGSGGMVFTLEDFVGDWEQTAAYNLDQVLEQGGVSSLLQNLAVSVTPIQRIVRSGENALKIDIHVIIPYEGLSADQMAQIEEVFKVVYPVDDHHFKVILPYGTLVIDGVTPNMLNYFGRPYEGIAVFDGKKITVTGTLWNGNKIIDERLITPDGSMLFRVTINSGSGHHHHHH

SEQ ID NO: 3806 - protein, 457 aa, Synthetic construct
MFHYVDVGPRDGTPVLFLHGNPTSSYVWRNIIPHVAPTHRCIAPDLIGMGKSDKPDLGYFFDDHVRFMDAFIEALGLEEVVLVIHDWGSALGFHWAKRNPERVKGIAFMEFIRPIPTWDEWPEFARETFQAFRTTDVGRKLIIDQNVIIEGTLPMGVVRPLTEVEMDHYREPFLNPVDREPLWRFPNELPIAGEPANIVALAEEYMDWLHQSPVPKLLFWGTPGVLIPPAEAARLAKSLPNCKAVDIGPGLNLLQEDNPDLIGSEIARWLSTLEISGGSGGSGGGGSGGMVFTLEDFVGDWEQTAAYNLDQVLEQGGVSSLLQNLAVSVTPIQRIVRSGENALKIDIHVIIPYEGLSADQMAQIEEVFKVVYPVDDHHFKVILPYGTLVIDGVTPNMLNYFGRPYEGIAVFDGKKITVTGTLWNGNKIIDERLITPDGSMLFRVTINSGSGHHHHHH

SEQ ID NO: 3807 - protein, 457 aa, Synthetic construct; identical to SEQ ID NO: 3583

SEQ ID NO: 3808 - protein, 457 aa, Synthetic construct; identical to SEQ ID NO: 3598

SEQ ID NO: 3809 - protein, 457 aa, Synthetic construct; identical to SEQ ID NO: 3613

SEQ ID NO: 3810 - protein, 457 aa, Synthetic construct
MLHYVDVGPRDGTPVLFLHGNPTSSYVWRNIIPHVAPTHRCIAPDLIGMGKSGKPDLGYFFDDHVRFMDAFIEALGLEEVVLVIHDWGSALGFHWAKRNPERVKGIAFMEFIRPIPDWDEWPEFARETFQAFRTTDVGRKLIIDQNVIIEGTLPMGVVRPLTEVEMDHYREPFLNPVDREPLWRFPNELPIAGEPANIVALVEEYMDWLHQSPVPKLLFWGTPGVLIPPAEAARLAKSLPNCKAVDIGPGLNLLQEDNPDLIGSEIARWLSTLEISGGSGGSGGGGSGGMVFTLEDFVGDWEQTAAYNLDQVLEQGGVSSLLQNLAVSVTPIQRIVRSGENALKIDIHVIIPYEGLSADQMAQIEEVFKVVYPVDDHHFKVILPYGTLVIDGVTPNMLNYFGRPYEGIAVFDGKKITVTGTLWNGNKIIDERLITPDGSMLFRVTINSGSGHHHHHH

SEQ ID NO: 3811 - protein, 457 aa, Synthetic construct
MLHYVDVGPRDGTPVLFLHGNPTSSYVWRNIIPHVAPTHRCIAPDLIGMGKSGKPDLGYFFDDHVRFMDAFIEALGLEEVVLVIHDWGSALGFHWAKRNPERVKGIAFMEFIRPIPDWDEWPEFARETFQAFRTTDVGRKLIIDQNVLIEGTLPMGVVRPLTEVEMDHYREPFLNPVDREPLWRFPNELPIAGEPANIVALVEEYMDWLHQSPVPKLLFWGTPGVLIPPAEAARLAKSLPNCKAVDIGPGLNLLQEDNPDLIGSEIARWLSTLEISGGSGGSGGGGSGGMVFTLEDFVGDWEQTAAYNLDQVLEQGGVSSLLQNLAVSVTPIQRIVRSGENALKIDIHVIIPYEGLSADQMAQIEEVFKVVYPVDDHHFKVILPYGTLVIDGVTPNMLNYFGRPYEGIAVFDGKKITVTGTLWNGNKIIDERLITPDGSMLFRVTINSGSGHHHHHH

SEQ ID NO: 3812 - protein, 457 aa, Synthetic construct
MLHYVDVGPRDGTPVLFLHGNPTSSYVWRNIIPHVAPTHRCIAPDLIGMGKSGKPDLGYFFDDHVRFMDAFIEALGLEEVVLVIHDWGSALGFHWAKRNPERVKGIAFMEFIRPIPDWDEWPEFARETFQAFRTTDVGRKLIIDQNVFIEGTLRMGVVRPLTEVEMDHYREPFLNPVDREPLWRFPNELPIAGEPANIVALVEEYMDWLHQSPVPKLLFWGTPGVLIPPAEAARLAKSLPNCKAVDIGPGLNLLQEDNPDLIGSEIARWLSTLEISGGSGGSGGGGSGGMVFTLEDFVGDWEQTAAYNLDQVLEQGGVSSLLQNLAVSVTPIQRIVRSGENALKIDIHVIIPYEGLSADQMAQIEEVFKVVYPVDDHHFKVILPYGTLVIDGVTPNMLNYFGRPYEGIAVFDGKKITVTGTLWNGNKIIDERLITPDGSMLFRVTINSGSGHHHHHH

SEQ ID NO: 3813 - protein, 457 aa, Synthetic construct
MLHYVDVGPRDGTPVLFLHGNPTSSYVWRNIIPHVAPTHRCIAPDLIGMGKSGKPDLGYFFDDHVRFMDAFIEALGLEEVVLVIHDWGSALGFHWAKRNPERVKGIAFMEFIRPIPDWDEWPEFARETFQAFRTTDVGRKLIIDQNVFIEGTLPMGVVRPLTEVEMDHYREPFLNAVDREPLWRFPNELPIAGEPANIVALVEEYMDWLHQSPVPKLLFWGTPGVLIPPAEAARLAKSLPNCKAVDIGPGLNLLQEDNPDLIGSEIARWLSTLEISGGSGGSGGGGSGGMVFTLEDFVGDWEQTAAYNLDQVLEQGGVSSLLQNLAVSVTPIQRIVRSGENALKIDIHVIIPYEGLSADQMAQIEEVFKVVYPVDDHHFKVILPYGTLVIDGVTPNMLNYFGRPYEGIAVFDGKKITVTGTLWNGNKIIDERLITPDGSMLFRVTINSGSGHHHHHH

SEQ ID NO: 3814 - protein, 457 aa, Synthetic construct
MLHYVDVGPRDGTPVLFLHGNPTSSYVWRNIIPHVAPTHRCIAPDLIGMGKSGKPDLGYFFDDHVRFMDAFIEALGLEEVVLVIHDWGSALGFHWAKRNPERVKGIAFMEFIRPIPDWDEWPEFARETFQAFRTTDVGRKLIIDQNVFIEGTLPMGVVRPLTEVEMDHYREPFLNPVDREPLWRWPNELPIAGEPANIVALVEEYMDWLHQSPVPKLLFWGTPGVLIPPAEAARLAKSLPNCKAVDIGPGLNLLQEDNPDLIGSEIARWLSTLEISGGSGGSGGGGSGGMVFTLEDFVGDWEQTAAYNLDQVLEQGGVSSLLQNLAVSVTPIQRIVRSGENALKIDIHVIIPYEGLSADQMAQIEEVFKVVYPVDDHHFKVILPYGTLVIDGVTPNMLNYFGRPYEGIAVFDGKKITVTGTLWNGNKIIDERLITPDGSMLFRVTINSGSGHHHHHH

SEQ ID NO: 3815 - protein, 457 aa, Synthetic construct
MLHYVDVGPRDGTPVLFLHGNPTSSYVWRNIIPHVAPTHRCIAPDLIGMGKSGKPDLGYFFDDHVRFMDAFIEALGLEEVVLVIHDWGSALGFHWAKRNPERVKGIAFMEFIRPIPDWDEWPEFARETFQAFRTTDVGRKLIIDQNVFIEGTLPMGVVRPLTEVEMDHYREPFLNPVDREPLWRFPNELPIGGEPANIVALVEEYMDWLHQSPVPKLLFWGTPGVLIPPAEAARLAKSLPNCKAVDIGPGLNLLQEDNPDLIGSEIARWLSTLEISGGSGGSGGGGSGGMVFTLEDFVGDWEQTAAYNLDQVLEQGGVSSLLQNLAVSVTPIQRIVRSGENALKIDIHVIIPYEGLSADQMAQIEEVFKVVYPVDDHHFKVILPYGTLVIDGVTPNMLNYFGRPYEGIAVFDGKKITVTGTLWNGNKIIDERLITPDGSMLFRVTINSGSGHHHHHH

SEQ ID NO: 3816 - protein, 457 aa, Synthetic construct
MLHYVDVGPRDGTPVLFLHGNPTSSYVWRNIIPHVAPTHRCIAPDLIGMGKSGKPDLGYFFDDHVRFMDAFIEALGLEEVVLVIHDWGSALGFHWAKRNPERVKGIAFMEFIRPIPDWDEWPEFARETFQAFRTTDVGRKLIIDQNVFIEGTLPMGVVRPLTEVEMDHYREPFLNPVDREPLWRFPNELPIAGEPANIVALAEEYMDWLHQSPVPKLLFWGTPGVLIPPAEAARLAKSLPNCKAVDIGPGLNLLQEDNPDLIGSEIARWLSTLEISGGSGGSGGGGSGGMVFTLEDFVGDWEQTAAYNLDQVLEQGGVSSLLQNLAVSVTPIQRIVRSGENALKIDIHVIIPYEGLSADQMAQIEEVFKVVYPVDDHHFKVILPYGTLVIDGVTPNMLNYFGRPYEGIAVFDGKKITVTGTLWNGNKIIDERLITPDGSMLFRVTINSGSGHHHHHH

SEQ ID NO: 3817 - protein, 457 aa, Synthetic construct; identical to SEQ ID NO: 3662

SEQ ID NO: 3818 - protein, 457 aa, Synthetic construct; identical to SEQ ID NO: 3677

SEQ ID NO: 3819 - protein, 457 aa, Synthetic construct; identical to SEQ ID NO: 3692

SEQ ID NO: 3820 - protein, 457 aa, Synthetic construct; identical to SEQ ID NO: 3707

SEQ ID NO: 3821 - protein, 457 aa, Synthetic construct; identical to SEQ ID NO: 3722

SEQ ID NO: 3822 - protein, 457 aa, Synthetic construct
MLHYVDVGPRDGTPVLFLHGNPTSSYVWRNIIPHVAPTHRCIAPDLIGMGKSGKPDLGYFFDDHVRFMDAFIEALGLEEVVLVIHDWGSALGFHWAKRNPERVKGIAFMEFIRPIPTWDEWPEFARKTFRAFRTTDVGRKLIIDQNVFIEGTLPMGVVRPLTEVEMDHYREPFLNPVDREPLWRFPNELPIAGEPANIVALVEEYMDWLHQSPVPKLLFWGTPGVLIPPAEAARLAKSLPNCKAVDIGPGLNLLQEDNPDLIGSEIARWLSTLEISGGSGGSGGGGSGGMVFTLEDFVGDWEQTAAYNLDQVLEQGGVSSLLQNLAVSVTPIQRIVRSGENALKIDIHVIIPYEGLSADQMAQIEEVFKVVYPVDDHHFKVILPYGTLVIDGVTPNMLNYFGRPYEGIAVFDGKKITVTGTLWNGNKIIDERLITPDGSMLFRVTINSGSGHHHHHH

SEQ ID NO: 3823 - protein, 457 aa, Synthetic construct
MLHYVDVGPRDGTPVLFLHGNPTSSYVWRNIIPHVAPTHRCIAPDLIGMGKSGKPDLGYFFDDHVRFMDAFIEALGLEEVVLVIHDWGSALGFHWAKRNPERVKGIAFMEFIRPIPTWDEWPEFARKTFQRFRTTDVGRKLIIDQNVFIEGTLPMGVVRPLTEVEMDHYREPFLNPVDREPLWRFPNELPIAGEPANIVALVEEYMDWLHQSPVPKLLFWGTPGVLIPPAEAARLAKSLPNCKAVDIGPGLNLLQEDNPDLIGSEIARWLSTLEISGGSGGSGGGGSGGMVFTLEDFVGDWEQTAAYNLDQVLEQGGVSSLLQNLAVSVTPIQRIVRSGENALKIDIHVIIPYEGLSADQMAQIEEVFKVVYPVDDHHFKVILPYGTLVIDGVTPNMLNYFGRPYEGIAVFDGKKITVTGTLWNGNKIIDERLITPDGSMLFRVTINSGSGHHHHHH

SEQ ID NO: 3824 - protein, 457 aa, Synthetic construct
MLHYVDVGPRDGTPVLFLHGNPTSSYVWRNIIPHVAPTHRCIAPDLIGMGKSGKPDLGYFFDDHVRFMDAFIEALGLEEVVLVIHDWGSALGFHWAKRNPERVKGIAFMEFIRPIPTWDEWPEFARKTFQAFRTTDVGRELIIDQNVFIEGTLPMGVVRPLTEVEMDHYREPFLNPVDREPLWRFPNELPIAGEPANIVALVEEYMDWLHQSPVPKLLFWGTPGVLIPPAEAARLAKSLPNCKAVDIGPGLNLLQEDNPDLIGSEIARWLSTLEISGGSGGSGGGGSGGMVFTLEDFVGDWEQTAAYNLDQVLEQGGVSSLLQNLAVSVTPIQRIVRSGENALKIDIHVIIPYEGLSADQMAQIEEVFKVVYPVDDHHFKVILPYGTLVIDGVTPNMLNYFGRPYEGIAVFDGKKITVTGTLWNGNKIIDERLITPDGSMLFRVTINSGSGHHHHHH

SEQ ID NO: 3825 - protein, 457 aa, Synthetic construct
MLHYVDVGPRDGTPVLFLHGNPTSSYVWRNIIPHVAPTHRCIAPDLIGMGKSGKPDLGYFFDDHVRFMDAFIEALGLEEVVLVIHDWGSALGFHWAKRNPERVKGIAFMEFIRPIPTWDEWPEFARKTFQAFRTTDVGRKLIIDQNVIIEGTLPMGVVRPLTEVEMDHYREPFLNPVDREPLWRFPNELPIAGEPANIVALVEEYMDWLHQSPVPKLLFWGTPGVLIPPAEAARLAKSLPNCKAVDIGPGLNLLQEDNPDLIGSEIARWLSTLEISGGSGGSGGGGSGGMVFTLEDFVGDWEQTAAYNLDQVLEQGGVSSLLQNLAVSVTPIQRIVRSGENALKIDIHVIIPYEGLSADQMAQIEEVFKVVYPVDDHHFKVILPYGTLVIDGVTPNMLNYFGRPYEGIAVFDGKKITVTGTLWNGNKIIDERLITPDGSMLFRVTINSGSGHHHHHH

SEQ ID NO: 3826 - protein, 457 aa, Synthetic construct
MLHYVDVGPRDGTPVLFLHGNPTSSYVWRNIIPHVAPTHRCIAPDLIGMGKSGKPDLGYFFDDHVRFMDAFIEALGLEEVVLVIHDWGSALGFHWAKRNPERVKGIAFMEFIRPIPTWDEWPEFARKTFQAFRTTDVGRKLIIDQNVLIEGTLPMGVVRPLTEVEMDHYREPFLNPVDREPLWRFPNELPIAGEPANIVALVEEYMDWLHQSPVPKLLFWGTPGVLIPPAEAARLAKSLPNCKAVDIGPGLNLLQEDNPDLIGSEIARWLSTLEISGGSGGSGGGGSGGMVFTLEDFVGDWEQTAAYNLDQVLEQGGVSSLLQNLAVSVTPIQRIVRSGENALKIDIHVIIPYEGLSADQMAQIEEVFKVVYPVDDHHFKVILPYGTLVIDGVTPNMLNYFGRPYEGIAVFDGKKITVTGTLWNGNKIIDERLITPDGSMLFRVTINSGSGHHHHHH

SEQ ID NO: 3827 - protein, 457 aa, Synthetic construct
MLHYVDVGPRDGTPVLFLHGNPTSSYVWRNIIPHVAPTHRCIAPDLIGMGKSGKPDLGYFFDDHVRFMDAFIEALGLEEVVLVIHDWGSALGFHWAKRNPERVKGIAFMEFIRPIPTWDEWPEFARKTFQAFRTTDVGRKLIIDQNVFIEGTLRMGVVRPLTEVEMDHYREPFLNPVDREPLWRFPNELPIAGEPANIVALVEEYMDWLHQSPVPKLLFWGTPGVLIPPAEAARLAKSLPNCKAVDIGPGLNLLQEDNPDLIGSEIARWLSTLEISGGSGGSGGGGSGGMVFTLEDFVGDWEQTAAYNLDQVLEQGGVSSLLQNLAVSVTPIQRIVRSGENALKIDIHVIIPYEGLSADQMAQIEEVFKVVYPVDDHHFKVILPYGTLVIDGVTPNMLNYFGRPYEGIAVFDGKKITVTGTLWNGNKIIDERLITPDGSMLFRVTINSGSGHHHHHH

SEQ ID NO: 3828 - protein, 457 aa, Synthetic construct
MLHYVDVGPRDGTPVLFLHGNPTSSYVWRNIIPHVAPTHRCIAPDLIGMGKSGKPDLGYFFDDHVRFMDAFIEALGLEEVVLVIHDWGSALGFHWAKRNPERVKGIAFMEFIRPIPTWDEWPEFARKTFQAFRTTDVGRKLIIDQNVFIEGTLPMGVVRPLTEVEMDHYREPFLNAVDREPLWRFPNELPIAGEPANIVALVEEYMDWLHQSPVPKLLFWGTPGVLIPPAEAARLAKSLPNCKAVDIGPGLNLLQEDNPDLIGSEIARWLSTLEISGGSGGSGGGGSGGMVFTLEDFVGDWEQTAAYNLDQVLEQGGVSSLLQNLAVSVTPIQRIVRSGENALKIDIHVIIPYEGLSADQMAQIEEVFKVVYPVDDHHFKVILPYGTLVIDGVTPNMLNYFGRPYEGIAVFDGKKITVTGTLWNGNKIIDERLITPDGSMLFRVTINSGSGHHHHHH

SEQ ID NO: 3829 - protein, 457 aa, Synthetic construct
MLHYVDVGPRDGTPVLFLHGNPTSSYVWRNIIPHVAPTHRCIAPDLIGMGKSGKPDLGYFFDDHVRFMDAFIEALGLEEVVLVIHDWGSALGFHWAKRNPERVKGIAFMEFIRPIPTWDEWPEFARKTFQAFRTTDVGRKLIIDQNVFIEGTLPMGVVRPLTEVEMDHYREPFLNPVDREPLWRWPNELPIAGEPANIVALVEEYMDWLHQSPVPKLLFWGTPGVLIPPAEAARLAKSLPNCKAVDIGPGLNLLQEDNPDLIGSEIARWLSTLEISGGSGGSGGGGSGGMVFTLEDFVGDWEQTAAYNLDQVLEQGGVSSLLQNLAVSVTPIQRIVRSGENALKIDIHVIIPYEGLSADQMAQIEEVFKVVYPVDDHHFKVILPYGTLVIDGVTPNMLNYFGRPYEGIAVFDGKKITVTGTLWNGNKIIDERLITPDGSMLFRVTINSGSGHHHHHH

SEQ ID NO: 3830 - protein, 457 aa, Synthetic construct
MLHYVDVGPRDGTPVLFLHGNPTSSYVWRNIIPHVAPTHRCIAPDLIGMGKSGKPDLGYFFDDHVRFMDAFIEALGLEEVVLVIHDWGSALGFHWAKRNPERVKGIAFMEFIRPIPTWDEWPEFARKTFQAFRTTDVGRKLIIDQNVFIEGTLPMGVVRPLTEVEMDHYREPFLNPVDREPLWRFPNELPIGGEPANIVALVEEYMDWLHQSPVPKLLFWGTPGVLIPPAEAARLAKSLPNCKAVDIGPGLNLLQEDNPDLIGSEIARWLSTLEISGGSGGSGGGGSGGMVFTLEDFVGDWEQTAAYNLDQVLEQGGVSSLLQNLAVSVTPIQRIVRSGENALKIDIHVIIPYEGLSADQMAQIEEVFKVVYPVDDHHFKVILPYGTLVIDGVTPNMLNYFGRPYEGIAVFDGKKITVTGTLWNGNKIIDERLITPDGSMLFRVTINSGSGHHHHHH

SEQ ID NO: 3831 - protein, 457 aa, Synthetic construct
MLHYVDVGPRDGTPVLFLHGNPTSSYVWRNIIPHVAPTHRCIAPDLIGMGKSGKPDLGYFFDDHVRFMDAFIEALGLEEVVLVIHDWGSALGFHWAKRNPERVKGIAFMEFIRPIPTWDEWPEFARKTFQAFRTTDVGRKLIIDQNVFIEGTLPMGVVRPLTEVEMDHYREPFLNPVDREPLWRFPNELPIAGEPANIVALAEEYMDWLHQSPVPKLLFWGTPGVLIPPAEAARLAKSLPNCKAVDIGPGLNLLQEDNPDLIGSEIARWLSTLEISGGSGGSGGGGSGGMVFTLEDFVGDWEQTAAYNLDQVLEQGGVSSLLQNLAVSVTPIQRIVRSGENALKIDIHVIIPYEGLSADQMAQIEEVFKVVYPVDDHHFKVILPYGTLVIDGVTPNMLNYFGRPYEGIAVFDGKKITVTGTLWNGNKIIDERLITPDGSMLFRVTINSGSGHHHHHH

SEQ ID NO: 3832 - protein, 457 aa, Synthetic construct; identical to SEQ ID NO: 3663

SEQ ID NO: 3833 - protein, 457 aa, Synthetic construct; identical to SEQ ID NO: 3678

SEQ ID NO: 3834 - protein, 457 aa, Synthetic construct; identical to SEQ ID NO: 3693

SEQ ID NO: 3835 - protein, 457 aa, Synthetic construct; identical to SEQ ID NO: 3708

SEQ ID NO: 3836 - protein, 457 aa, Synthetic construct; identical to SEQ ID NO: 3723

SEQ ID NO: 3837 - protein, 457 aa, Synthetic construct; identical to SEQ ID NO: 3822

SEQ ID NO: 3838 - protein, 457 aa, Synthetic construct
MLHYVDVGPRDGTPVLFLHGNPTSSYVWRNIIPHVAPTHRCIAPDLIGMGKSGKPDLGYFFDDHVRFMDAFIEALGLEEVVLVIHDWGSALGFHWAKRNPERVKGIAFMEFIRPIPTWDEWPEFARETFRRFRTTDVGRKLIIDQNVFIEGTLPMGVVRPLTEVEMDHYREPFLNPVDREPLWRFPNELPIAGEPANIVALVEEYMDWLHQSPVPKLLFWGTPGVLIPPAEAARLAKSLPNCKAVDIGPGLNLLQEDNPDLIGSEIARWLSTLEISGGSGGSGGGGSGGMVFTLEDFVGDWEQTAAYNLDQVLEQGGVSSLLQNLAVSVTPIQRIVRSGENALKIDIHVIIPYEGLSADQMAQIEEVFKVVYPVDDHHFKVILPYGTLVIDGVTPNMLNYFGRPYEGIAVFDGKKITVTGTLWNGNKIIDERLITPDGSMLFRVTINSGSGHHHHHH

SEQ ID NO: 3839 - protein, 457 aa, Synthetic construct
MLHYVDVGPRDGTPVLFLHGNPTSSYVWRNIIPHVAPTHRCIAPDLIGMGKSGKPDLGYFFDDHVRFMDAFIEALGLEEVVLVIHDWGSALGFHWAKRNPERVKGIAFMEFIRPIPTWDEWPEFARETFRAFRTTDVGRELIIDQNVFIEGTLPMGVVRPLTEVEMDHYREPFLNPVDREPLWRFPNELPIAGEPANIVALVEEYMDWLHQSPVPKLLFWGTPGVLIPPAEAARLAKSLPNCKAVDIGPGLNLLQEDNPDLIGSEIARWLSTLEISGGSGGSGGGGSGGMVFTLEDFVGDWEQTAAYNLDQVLEQGGVSSLLQNLAVSVTPIQRIVRSGENALKIDIHVIIPYEGLSADQMAQIEEVFKVVYPVDDHHFKVILPYGTLVIDGVTPNMLNYFGRPYEGIAVFDGKKITVTGTLWNGNKIIDERLITPDGSMLFRVTINSGSGHHHHHH

SEQ ID NO: 3840 - protein, 457 aa, Synthetic construct
MLHYVDVGPRDGTPVLFLHGNPTSSYVWRNIIPHVAPTHRCIAPDLIGMGKSGKPDLGYFFDDHVRFMDAFIEALGLEEVVLVIHDWGSALGFHWAKRNPERVKGIAFMEFIRPIPTWDEWPEFARETFRAFRTTDVGRKLIIDQNVIIEGTLPMGVVRPLTEVEMDHYREPFLNPVDREPLWRFPNELPIAGEPANIVALVEEYMDWLHQSPVPKLLFWGTPGVLIPPAEAARLAKSLPNCKAVDIGPGLNLLQEDNPDLIGSEIARWLSTLEISGGSGGSGGGGSGGMVFTLEDFVGDWEQTAAYNLDQVLEQGGVSSLLQNLAVSVTPIQRIVRSGENALKIDIHVIIPYEGLSADQMAQIEEVFKVVYPVDDHHFKVILPYGTLVIDGVTPNMLNYFGRPYEGIAVFDGKKITVTGTLWNGNKIIDERLITPDGSMLFRVTINSGSGHHHHHH

SEQ ID NO: 3841 - protein, 457 aa, Synthetic construct
MLHYVDVGPRDGTPVLFLHGNPTSSYVWRNIIPHVAPTHRCIAPDLIGMGKSGKPDLGYFFDDHVRFMDAFIEALGLEEVVLVIHDWGSALGFHWAKRNPERVKGIAFMEFIRPIPTWDEWPEFARETFRAFRTTDVGRKLIIDQNVLIEGTLPMGVVRPLTEVEMDHYREPFLNPVDREPLWRFPNELPIAGEPANIVALVEEYMDWLHQSPVPKLLFWGTPGVLIPPAEAARLAKSLPNCKAVDIGPGLNLLQEDNPDLIGSEIARWLSTLEISGGSGGSGGGGSGGMVFTLEDFVGDWEQTAAYNLDQVLEQGGVSSLLQNLAVSVTPIQRIVRSGENALKIDIHVIIPYEGLSADQMAQIEEVFKVVYPVDDHHFKVILPYGTLVIDGVTPNMLNYFGRPYEGIAVFDGKKITVTGTLWNGNKIIDERLITPDGSMLFRVTINSGSGHHHHHH

SEQ ID NO: 3842 - protein, 457 aa, Synthetic construct
MLHYVDVGPRDGTPVLFLHGNPTSSYVWRNIIPHVAPTHRCIAPDLIGMGKSGKPDLGYFFDDHVRFMDAFIEALGLEEVVLVIHDWGSALGFHWAKRNPERVKGIAFMEFIRPIPTWDEWPEFARETFRAFRTTDVGRKLIIDQNVFIEGTLRMGVVRPLTEVEMDHYREPFLNPVDREPLWRFPNELPIAGEPANIVALVEEYMDWLHQSPVPKLLFWGTPGVLIPPAEAARLAKSLPNCKAVDIGPGLNLLQEDNPDLIGSEIARWLSTLEISGGSGGSGGGGSGGMVFTLEDFVGDWEQTAAYNLDQVLEQGGVSSLLQNLAVSVTPIQRIVRSGENALKIDIHVIIPYEGLSADQMAQIEEVFKVVYPVDDHHFKVILPYGTLVIDGVTPNMLNYFGRPYEGIAVFDGKKITVTGTLWNGNKIIDERLITPDGSMLFRVTINSGSGHHHHHH

SEQ ID NO: 3843 - protein, 457 aa, Synthetic construct
MLHYVDVGPRDGTPVLFLHGNPTSSYVWRNIIPHVAPTHRCIAPDLIGMGKSGKPDLGYFFDDHVRFMDAFIEALGLEEVVLVIHDWGSALGFHWAKRNPERVKGIAFMEFIRPIPTWDEWPEFARETFRAFRTTDVGRKLIIDQNVFIEGTLPMGVVRPLTEVEMDHYREPFLNAVDREPLWRFPNELPIAGEPANIVALVEEYMDWLHQSPVPKLLFWGTPGVLIPPAEAARLAKSLPNCKAVDIGPGLNLLQEDNPDLIGSEIARWLSTLEISGGSGGSGGGGSGGMVFTLEDFVGDWEQTAAYNLDQVLEQGGVSSLLQNLAVSVTPIQRIVRSGENALKIDIHVIIPYEGLSADQMAQIEEVFKVVYPVDDHHFKVILPYGTLVIDGVTPNMLNYFGRPYEGIAVFDGKKITVTGTLWNGNKIIDERLITPDGSMLFRVTINSGSGHHHHHH

SEQ ID NO: 3844 - protein, 457 aa, Synthetic construct
MLHYVDVGPRDGTPVLFLHGNPTSSYVWRNIIPHVAPTHRCIAPDLIGMGKSGKPDLGYFFDDHVRFMDAFIEALGLEEVVLVIHDWGSALGFHWAKRNPERVKGIAFMEFIRPIPTWDEWPEFARETFRAFRTTDVGRKLIIDQNVFIEGTLPMGVVRPLTEVEMDHYREPFLNPVDREPLWRWPNELPIAGEPANIVALVEEYMDWLHQSPVPKLLFWGTPGVLIPPAEAARLAKSLPNCKAVDIGPGLNLLQEDNPDLIGSEIARWLSTLEISGGSGGSGGGGSGGMVFTLEDFVGDWEQTAAYNLDQVLEQGGVSSLLQNLAVSVTPIQRIVRSGENALKIDIHVIIPYEGLSADQMAQIEEVFKVVYPVDDHHFKVILPYGTLVIDGVTPNMLNYFGRPYEGIAVFDGKKITVTGTLWNGNKIIDERLITPDGSMLFRVTINSGSGHHHHHH

SEQ ID NO: 3845 - protein, 457 aa, Synthetic construct
MLHYVDVGPRDGTPVLFLHGNPTSSYVWRNIIPHVAPTHRCIAPDLIGMGKSGKPDLGYFFDDHVRFMDAFIEALGLEEVVLVIHDWGSALGFHWAKRNPERVKGIAFMEFIRPIPTWDEWPEFARETFRAFRTTDVGRKLIIDQNVFIEGTLPMGVVRPLTEVEMDHYREPFLNPVDREPLWRFPNELPIGGEPANIVALVEEYMDWLHQSPVPKLLFWGTPGVLIPPAEAARLAKSLPNCKAVDIGPGLNLLQEDNPDLIGSEIARWLSTLEISGGSGGSGGGGSGGMVFTLEDFVGDWEQTAAYNLDQVLEQGGVSSLLQNLAVSVTPIQRIVRSGENALKIDIHVIIPYEGLSADQMAQIEEVFKVVYPVDDHHFKVILPYGTLVIDGVTPNMLNYFGRPYEGIAVFDGKKITVTGTLWNGNKIIDERLITPDGSMLFRVTINSGSGHHHHHH

SEQ ID NO: 3846 - protein, 457 aa, Synthetic construct
MLHYVDVGPRDGTPVLFLHGNPTSSYVWRNIIPHVAPTHRCIAPDLIGMGKSGKPDLGYFFDDHVRFMDAFIEALGLEEVVLVIHDWGSALGFHWAKRNPERVKGIAFMEFIRPIPTWDEWPEFARETFRAFRTTDVGRKLIIDQNVFIEGTLPMGVVRPLTEVEMDHYREPFLNPVDREPLWRFPNELPIAGEPANIVALAEEYMDWLHQSPVPKLLFWGTPGVLIPPAEAARLAKSLPNCKAVDIGPGLNLLQEDNPDLIGSEIARWLSTLEISGGSGGSGGGGSGGMVFTLEDFVGDWEQTAAYNLDQVLEQGGVSSLLQNLAVSVTPIQRIVRSGENALKIDIHVIIPYEGLSADQMAQIEEVFKVVYPVDDHHFKVILPYGTLVIDGVTPNMLNYFGRPYEGIAVFDGKKITVTGTLWNGNKIIDERLITPDGSMLFRVTINSGSGHHHHHH

SEQ ID NO: 3847 - protein, 457 aa, Synthetic construct; identical to SEQ ID NO: 3664

SEQ ID NO: 3848 - protein, 457 aa, Synthetic construct; identical to SEQ ID NO: 3679

SEQ ID NO: 3849 - protein, 457 aa, Synthetic construct; identical to SEQ ID NO: 3694

SEQ ID NO: 3850 - protein, 457 aa, Synthetic construct; identical to SEQ ID NO: 3709

SEQ ID NO: 3851 - protein, 457 aa, Synthetic construct; identical to SEQ ID NO: 3724

SEQ ID NO: 3852 - protein, 457 aa, Synthetic construct; identical to SEQ ID NO: 3823

SEQ ID NO: 3853 - protein, 457 aa, Synthetic construct; identical to SEQ ID NO: 3838

SEQ ID NO: 3854 - protein, 457 aa, Synthetic construct
MLHYVDVGPRDGTPVLFLHGNPTSSYVWRNIIPHVAPTHRCIAPDLIGMGKSGKPDLGYFFDDHVRFMDAFIEALGLEEVVLVIHDWGSALGFHWAKRNPERVKGIAFMEFIRPIPTWDEWPEFARETFQRFRTTDVGRELIIDQNVFIEGTLPMGVVRPLTEVEMDHYREPFLNPVDREPLWRFPNELPIAGEPANIVALVEEYMDWLHQSPVPKLLFWGTPGVLIPPAEAARLAKSLPNCKAVDIGPGLNLLQEDNPDLIGSEIARWLSTLEISGGSGGSGGGGSGGMVFTLEDFVGDWEQTAAYNLDQVLEQGGVSSLLQNLAVSVTPIQRIVRSGENALKIDIHVIIPYEGLSADQMAQIEEVFKVVYPVDDHHFKVILPYGTLVIDGVTPNMLNYFGRPYEGIAVFDGKKITVTGTLWNGNKIIDERLITPDGSMLFRVTINSGSGHHHHHH

SEQ ID NO: 3855 - protein, 457 aa, Synthetic construct
MLHYVDVGPRDGTPVLFLHGNPTSSYVWRNIIPHVAPTHRCIAPDLIGMGKSGKPDLGYFFDDHVRFMDAFIEALGLEEVVLVIHDWGSALGFHWAKRNPERVKGIAFMEFIRPIPTWDEWPEFARETFQRFRTTDVGRKLIIDQNVIIEGTLPMGVVRPLTEVEMDHYREPFLNPVDREPLWRFPNELPIAGEPANIVALVEEYMDWLHQSPVPKLLFWGTPGVLIPPAEAARLAKSLPNCKAVDIGPGLNLLQEDNPDLIGSEIARWLSTLEISGGSGGSGGGGSGGMVFTLEDFVGDWEQTAAYNLDQVLEQGGVSSLLQNLAVSVTPIQRIVRSGENALKIDIHVIIPYEGLSADQMAQIEEVFKVVYPVDDHHFKVILPYGTLVIDGVTPNMLNYFGRPYEGIAVFDGKKITVTGTLWNGNKIIDERLITPDGSMLFRVTINSGSGHHHHHH

SEQ ID NO: 3856 - protein, 457 aa, Synthetic construct
MLHYVDVGPRDGTPVLFLHGNPTSSYVWRNIIPHVAPTHRCIAPDLIGMGKSGKPDLGYFFDDHVRFMDAFIEALGLEEVVLVIHDWGSALGFHWAKRNPERVKGIAFMEFIRPIPTWDEWPEFARETFQRFRTTDVGRKLIIDQNVLIEGTLPMGVVRPLTEVEMDHYREPFLNPVDREPLWRFPNELPIAGEPANIVALVEEYMDWLHQSPVPKLLFWGTPGVLIPPAEAARLAKSLPNCKAVDIGPGLNLLQEDNPDLIGSEIARWLSTLEISGGSGGSGGGGSGGMVFTLEDFVGDWEQTAAYNLDQVLEQGGVSSLLQNLAVSVTPIQRIVRSGENALKIDIHVIIPYEGLSADQMAQIEEVFKVVYPVDDHHFKVILPYGTLVIDGVTPNMLNYFGRPYEGIAVFDGKKITVTGTLWNGNKIIDERLITPDGSMLFRVTINSGSGHHHHHH

SEQ ID NO: 3857 - protein, 457 aa, Synthetic construct
MLHYVDVGPRDGTPVLFLHGNPTSSYVWRNIIPHVAPTHRCIAPDLIGMGKSGKPDLGYFFDDHVRFMDAFIEALGLEEVVLVIHDWGSALGFHWAKRNPERVKGIAFMEFIRPIPTWDEWPEFARETFQRFRTTDVGRKLIIDQNVFIEGTLRMGVVRPLTEVEMDHYREPFLNPVDREPLWRFPNELPIAGEPANIVALVEEYMDWLHQSPVPKLLFWGTPGVLIPPAEAARLAKSLPNCKAVDIGPGLNLLQEDNPDLIGSEIARWLSTLEISGGSGGSGGGGSGGMVFTLEDFVGDWEQTAAYNLDQVLEQGGVSSLLQNLAVSVTPIQRIVRSGENALKIDIHVIIPYEGLSADQMAQIEEVFKVVYPVDDHHFKVILPYGTLVIDGVTPNMLNYFGRPYEGIAVFDGKKITVTGTLWNGNKIIDERLITPDGSMLFRVTINSGSGHHHHHH

SEQ ID NO: 3858 - protein, 457 aa, Synthetic construct
MLHYVDVGPRDGTPVLFLHGNPTSSYVWRNIIPHVAPTHRCIAPDLIGMGKSGKPDLGYFFDDHVRFMDAFIEALGLEEVVLVIHDWGSALGFHWAKRNPERVKGIAFMEFIRPIPTWDEWPEFARETFQRFRTTDVGRKLIIDQNVFIEGTLPMGVVRPLTEVEMDHYREPFLNAVDREPLWRFPNELPIAGEPANIVALVEEYMDWLHQSPVPKLLFWGTPGVLIPPAEAARLAKSLPNCKAVDIGPGLNLLQEDNPDLIGSEIARWLSTLEISGGSGGSGGGGSGGMVFTLEDFVGDWEQTAAYNLDQVLEQGGVSSLLQNLAVSVTPIQRIVRSGENALKIDIHVIIPYEGLSADQMAQIEEVFKVVYPVDDHHFKVILPYGTLVIDGVTPNMLNYFGRPYEGIAVFDGKKITVTGTLWNGNKIIDERLITPDGSMLFRVTINSGSGHHHHHH

SEQ ID NO: 3859 - protein, 457 aa, Synthetic construct
MLHYVDVGPRDGTPVLFLHGNPTSSYVWRNIIPHVAPTHRCIAPDLIGMGKSGKPDLGYFFDDHVRFMDAFIEALGLEEVVLVIHDWGSALGFHWAKRNPERVKGIAFMEFIRPIPTWDEWPEFARETFQRFRTTDVGRKLIIDQNVFIEGTLPMGVVRPLTEVEMDHYREPFLNPVDREPLWRWPNELPIAGEPANIVALVEEYMDWLHQSPVPKLLFWGTPGVLIPPAEAARLAKSLPNCKAVDIGPGLNLLQEDNPDLIGSEIARWLSTLEISGGSGGSGGGGSGGMVFTLEDFVGDWEQTAAYNLDQVLEQGGVSSLLQNLAVSVTPIQRIVRSGENALKIDIHVIIPYEGLSADQMAQIEEVFKVVYPVDDHHFKVILPYGTLVIDGVTPNMLNYFGRPYEGIAVFDGKKITVTGTLWNGNKIIDERLITPDGSMLFRVTINSGSGHHHHHH

SEQ ID NO: 3860 - protein, 457 aa, Synthetic construct
MLHYVDVGPRDGTPVLFLHGNPTSSYVWRNIIPHVAPTHRCIAPDLIGMGKSGKPDLGYFFDDHVRFMDAFIEALGLEEVVLVIHDWGSALGFHWAKRNPERVKGIAFMEFIRPIPTWDEWPEFARETFQRFRTTDVGRKLIIDQNVFIEGTLPMGVVRPLTEVEMDHYREPFLNPVDREPLWRFPNELPIGGEPANIVALVEEYMDWLHQSPVPKLLFWGTPGVLIPPAEAARLAKSLPNCKAVDIGPGLNLLQEDNPDLIGSEIARWLSTLEISGGSGGSGGGGSGGMVFTLEDFVGDWEQTAAYNLDQVLEQGGVSSLLQNLAVSVTPIQRIVRSGENALKIDIHVIIPYEGLSADQMAQIEEVFKVVYPVDDHHFKVILPYGTLVIDGVTPNMLNYFGRPYEGIAVFDGKKITVTGTLWNGNKIIDERLITPDGSMLFRVTINSGSGHHHHHH

SEQ ID NO: 3861 - protein, 457 aa, Synthetic construct
MLHYVDVGPRDGTPVLFLHGNPTSSYVWRNIIPHVAPTHRCIAPDLIGMGKSGKPDLGYFFDDHVRFMDAFIEALGLEEVVLVIHDWGSALGFHWAKRNPERVKGIAFMEFIRPIPTWDEWPEFARETFQRFRTTDVGRKLIIDQNVFIEGTLPMGVVRPLTEVEMDHYREPFLNPVDREPLWRFPNELPIAGEPANIVALAEEYMDWLHQSPVPKLLFWGTPGVLIPPAEAARLAKSLPNCKAVDIGPGLNLLQEDNPDLIGSEIARWLSTLEISGGSGGSGGGGSGGMVFTLEDFVGDWEQTAAYNLDQVLEQGGVSSLLQNLAVSVTPIQRIVRSGENALKIDIHVIIPYEGLSADQMAQIEEVFKVVYPVDDHHFKVILPYGTLVIDGVTPNMLNYFGRPYEGIAVFDGKKITVTGTLWNGNKIIDERLITPDGSMLFRVTINSGSGHHHHHH

SEQ ID NO: 3862 - protein, 457 aa, Synthetic construct; identical to SEQ ID NO: 3665

SEQ ID NO: 3863 - protein, 457 aa, Synthetic construct; identical to SEQ ID NO: 3680

SEQ ID NO: 3864 - protein, 457 aa, Synthetic construct; identical to SEQ ID NO: 3695

SEQ ID NO: 3865 - protein, 457 aa, Synthetic construct; identical to SEQ ID NO: 3710

SEQ ID NO: 3866 - protein, 457 aa, Synthetic construct; identical to SEQ ID NO: 3725

SEQ ID NO: 3867 - protein, 457 aa, Synthetic construct; identical to SEQ ID NO: 3824

SEQ ID NO: 3868 - protein, 457 aa, Synthetic construct; identical to SEQ ID NO: 3839

SEQ ID NO: 3869 - protein, 457 aa, Synthetic construct; identical to SEQ ID NO: 3854

SEQ ID NO: 3870 - protein, 457 aa, Synthetic construct
MLHYVDVGPRDGTPVLFLHGNPTSSYVWRNIIPHVAPTHRCIAPDLIGMGKSGKPDLGYFFDDHVRFMDAFIEALGLEEVVLVIHDWGSALGFHWAKRNPERVKGIAFMEFIRPIPTWDEWPEFARETFQAFRTTDVGRELIIDQNVIIEGTLPMGVVRPLTEVEMDHYREPFLNPVDREPLWRFPNELPIAGEPANIVALVEEYMDWLHQSPVPKLLFWGTPGVLIPPAEAARLAKSLPNCKAVDIGPGLNLLQEDNPDLIGSEIARWLSTLEISGGSGGSGGGGSGGMVFTLEDFVGDWEQTAAYNLDQVLEQGGVSSLLQNLAVSVTPIQRIVRSGENALKIDIHVIIPYEGLSADQMAQIEEVFKVVYPVDDHHFKVILPYGTLVIDGVTPNMLNYFGRPYEGIAVFDGKKITVTGTLWNGNKIIDERLITPDGSMLFRVTINSGSGHHHHHH

SEQ ID NO: 3871 - protein, 457 aa, Synthetic construct
MLHYVDVGPRDGTPVLFLHGNPTSSYVWRNIIPHVAPTHRCIAPDLIGMGKSGKPDLGYFFDDHVRFMDAFIEALGLEEVVLVIHDWGSALGFHWAKRNPERVKGIAFMEFIRPIPTWDEWPEFARETFQAFRTTDVGRELIIDQNVLIEGTLPMGVVRPLTEVEMDHYREPFLNPVDREPLWRFPNELPIAGEPANIVALVEEYMDWLHQSPVPKLLFWGTPGVLIPPAEAARLAKSLPNCKAVDIGPGLNLLQEDNPDLIGSEIARWLSTLEISGGSGGSGGGGSGGMVFTLEDFVGDWEQTAAYNLDQVLEQGGVSSLLQNLAVSVTPIQRIVRSGENALKIDIHVIIPYEGLSADQMAQIEEVFKVVYPVDDHHFKVILPYGTLVIDGVTPNMLNYFGRPYEGIAVFDGKKITVTGTLWNGNKIIDERLITPDGSMLFRVTINSGSGHHHHHH

SEQ ID NO: 3872 - protein, 457 aa, Synthetic construct
MLHYVDVGPRDGTPVLFLHGNPTSSYVWRNIIPHVAPTHRCIAPDLIGMGKSGKPDLGYFFDDHVRFMDAFIEALGLEEVVLVIHDWGSALGFHWAKRNPERVKGIAFMEFIRPIPTWDEWPEFARETFQAFRTTDVGRELIIDQNVFIEGTLRMGVVRPLTEVEMDHYREPFLNPVDREPLWRFPNELPIAGEPANIVALVEEYMDWLHQSPVPKLLFWGTPGVLIPPAEAARLAKSLPNCKAVDIGPGLNLLQEDNPDLIGSEIARWLSTLEISGGSGGSGGGGSGGMVFTLEDFVGDWEQTAAYNLDQVLEQGGVSSLLQNLAVSVTPIQRIVRSGENALKIDIHVIIPYEGLSADQMAQIEEVFKVVYPVDDHHFKVILPYGTLVIDGVTPNMLNYFGRPYEGIAVFDGKKITVTGTLWNGNKIIDERLITPDGSMLFRVTINSGSGHHHHHH

SEQ ID NO: 3873 - protein, 457 aa, Synthetic construct
MLHYVDVGPRDGTPVLFLHGNPTSSYVWRNIIPHVAPTHRCIAPDLIGMGKSGKPDLGYFFDDHVRFMDAFIEALGLEEVVLVIHDWGSALGFHWAKRNPERVKGIAFMEFIRPIPTWDEWPEFARETFQAFRTTDVGRELIIDQNVFIEGTLPMGVVRPLTEVEMDHYREPFLNAVDREPLWRFPNELPIAGEPANIVALVEEYMDWLHQSPVPKLLFWGTPGVLIPPAEAARLAKSLPNCKAVDIGPGLNLLQEDNPDLIGSEIARWLSTLEISGGSGGSGGGGSGGMVFTLEDFVGDWEQTAAYNLDQVLEQGGVSSLLQNLAVSVTPIQRIVRSGENALKIDIHVIIPYEGLSADQMAQIEEVFKVVYPVDDHHFKVILPYGTLVIDGVTPNMLNYFGRPYEGIAVFDGKKITVTGTLWNGNKIIDERLITPDGSMLFRVTINSGSGHHHHHH

SEQ ID NO: 3874 - protein, 457 aa, Synthetic construct
MLHYVDVGPRDGTPVLFLHGNPTSSYVWRNIIPHVAPTHRCIAPDLIGMGKSGKPDLGYFFDDHVRFMDAFIEALGLEEVVLVIHDWGSALGFHWAKRNPERVKGIAFMEFIRPIPTWDEWPEFARETFQAFRTTDVGRELIIDQNVFIEGTLPMGVVRPLTEVEMDHYREPFLNPVDREPLWRWPNELPIAGEPANIVALVEEYMDWLHQSPVPKLLFWGTPGVLIPPAEAARLAKSLPNCKAVDIGPGLNLLQEDNPDLIGSEIARWLSTLEISGGSGGSGGGGSGGMVFTLEDFVGDWEQTAAYNLDQVLEQGGVSSLLQNLAVSVTPIQRIVRSGENALKIDIHVIIPYEGLSADQMAQIEEVFKVVYPVDDHHFKVILPYGTLVIDGVTPNMLNYFGRPYEGIAVFDGKKITVTGTLWNGNKIIDERLITPDGSMLFRVTINSGSGHHHHHH

SEQ ID NO: 3875 - protein, 457 aa, Synthetic construct
MLHYVDVGPRDGTPVLFLHGNPTSSYVWRNIIPHVAPTHRCIAPDLIGMGKSGKPDLGYFFDDHVRFMDAFIEALGLEEVVLVIHDWGSALGFHWAKRNPERVKGIAFMEFIRPIPTWDEWPEFARETFQAFRTTDVGRELIIDQNVFIEGTLPMGVVRPLTEVEMDHYREPFLNPVDREPLWRFPNELPIGGEPANIVALVEEYMDWLHQSPVPKLLFWGTPGVLIPPAEAARLAKSLPNCKAVDIGPGLNLLQEDNPDLIGSEIARWLSTLEISGGSGGSGGGGSGGMVFTLEDFVGDWEQTAAYNLDQVLEQGGVSSLLQNLAVSVTPIQRIVRSGENALKIDIHVIIPYEGLSADQMAQIEEVFKVVYPVDDHHFKVILPYGTLVIDGVTPNMLNYFGRPYEGIAVFDGKKITVTGTLWNGNKIIDERLITPDGSMLFRVTINSGSGHHHHHH

SEQ ID NO: 3876 - protein, 457 aa, Synthetic construct
MLHYVDVGPRDGTPVLFLHGNPTSSYVWRNIIPHVAPTHRCIAPDLIGMGKSGKPDLGYFFDDHVRFMDAFIEALGLEEVVLVIHDWGSALGFHWAKRNPERVKGIAFMEFIRPIPTWDEWPEFARETFQAFRTTDVGRELIIDQNVFIEGTLPMGVVRPLTEVEMDHYREPFLNPVDREPLWRFPNELPIAGEPANIVALAEEYMDWLHQSPVPKLLFWGTPGVLIPPAEAARLAKSLPNCKAVDIGPGLNLLQEDNPDLIGSEIARWLSTLEISGGSGGSGGGGSGGMVFTLEDFVGDWEQTAAYNLDQVLEQGGVSSLLQNLAVSVTPIQRIVRSGENALKIDIHVIIPYEGLSADQMAQIEEVFKVVYPVDDHHFKVILPYGTLVIDGVTPNMLNYFGRPYEGIAVFDGKKITVTGTLWNGNKIIDERLITPDGSMLFRVTINSGSGHHHHHH

SEQ ID NO: 3877 - protein, 457 aa, Synthetic construct; identical to SEQ ID NO: 3666

SEQ ID NO: 3878 - protein, 457 aa, Synthetic construct; identical to SEQ ID NO: 3681

SEQ ID NO: 3879 - protein, 457 aa, Synthetic construct; identical to SEQ ID NO: 3696

SEQ ID NO: 3880 - protein, 457 aa, Synthetic construct; identical to SEQ ID NO: 3711

SEQ ID NO: 3881 - protein, 457 aa, Synthetic construct; identical to SEQ ID NO: 3810

SEQ ID NO: 3882 - protein, 457 aa, Synthetic construct; identical to SEQ ID NO: 3825

SEQ ID NO: 3883 - protein, 457 aa, Synthetic construct; identical to SEQ ID NO: 3840

SEQ ID NO: 3884 - protein, 457 aa, Synthetic construct; identical to SEQ ID NO: 3855

SEQ ID NO: 3885 - protein, 457 aa, Synthetic construct; identical to SEQ ID NO: 3870

SEQ ID NO: 3886 - protein, 457 aa, Synthetic construct
MLHYVDVGPRDGTPVLFLHGNPTSSYVWRNIIPHVAPTHRCIAPDLIGMGKSGKPDLGYFFDDHVRFMDAFIEALGLEEVVLVIHDWGSALGFHWAKRNPERVKGIAFMEFIRPIPTWDEWPEFARETFQAFRTTDVGRKLIIDQNVIIEGTLRMGVVRPLTEVEMDHYREPFLNPVDREPLWRFPNELPIAGEPANIVALVEEYMDWLHQSPVPKLLFWGTPGVLIPPAEAARLAKSLPNCKAVDIGPGLNLLQEDNPDLIGSEIARWLSTLEISGGSGGSGGGGSGGMVFTLEDFVGDWEQTAAYNLDQVLEQGGVSSLLQNLAVSVTPIQRIVRSGENALKIDIHVIIPYEGLSADQMAQIEEVFKVVYPVDDHHFKVILPYGTLVIDGVTPNMLNYFGRPYEGIAVFDGKKITVTGTLWNGNKIIDERLITPDGSMLFRVTINSGSGHHHHHH

SEQ ID NO: 3887 - protein, 457 aa, Synthetic construct
MLHYVDVGPRDGTPVLFLHGNPTSSYVWRNIIPHVAPTHRCIAPDLIGMGKSGKPDLGYFFDDHVRFMDAFIEALGLEEVVLVIHDWGSALGFHWAKRNPERVKGIAFMEFIRPIPTWDEWPEFARETFQAFRTTDVGRKLIIDQNVIIEGTLPMGVVRPLTEVEMDHYREPFLNAVDREPLWRFPNELPIAGEPANIVALVEEYMDWLHQSPVPKLLFWGTPGVLIPPAEAARLAKSLPNCKAVDIGPGLNLLQEDNPDLIGSEIARWLSTLEISGGSGGSGGGGSGGMVFTLEDFVGDWEQTAAYNLDQVLEQGGVSSLLQNLAVSVTPIQRIVRSGENALKIDIHVIIPYEGLSADQMAQIEEVFKVVYPVDDHHFKVILPYGTLVIDGVTPNMLNYFGRPYEGIAVFDGKKITVTGTLWNGNKIIDERLITPDGSMLFRVTINSGSGHHHHHH

SEQ ID NO: 3888 - protein, 457 aa, Synthetic construct
MLHYVDVGPRDGTPVLFLHGNPTSSYVWRNIIPHVAPTHRCIAPDLIGMGKSGKPDLGYFFDDHVRFMDAFIEALGLEEVVLVIHDWGSALGFHWAKRNPERVKGIAFMEFIRPIPTWDEWPEFARETFQAFRTTDVGRKLIIDQNVIIEGTLPMGVVRPLTEVEMDHYREPFLNPVDREPLWRWPNELPIAGEPANIVALVEEYMDWLHQSPVPKLLFWGTPGVLIPPAEAARLAKSLPNCKAVDIGPGLNLLQEDNPDLIGSEIARWLSTLEISGGSGGSGGGGSGGMVFTLEDFVGDWEQTAAYNLDQVLEQGGVSSLLQNLAVSVTPIQRIVRSGENALKIDIHVIIPYEGLSADQMAQIEEVFKVVYPVDDHHFKVILPYGTLVIDGVTPNMLNYFGRPYEGIAVFDGKKITVTGTLWNGNKIIDERLITPDGSMLFRVTINSGSGHHHHHH

SEQ ID NO: 3889 - protein, 457 aa, Synthetic construct
MLHYVDVGPRDGTPVLFLHGNPTSSYVWRNIIPHVAPTHRCIAPDLIGMGKSGKPDLGYFFDDHVRFMDAFIEALGLEEVVLVIHDWGSALGFHWAKRNPERVKGIAFMEFIRPIPTWDEWPEFARETFQAFRTTDVGRKLIIDQNVIIEGTLPMGVVRPLTEVEMDHYREPFLNPVDREPLWRFPNELPIGGEPANIVALVEEYMDWLHQSPVPKLLFWGTPGVLIPPAEAARLAKSLPNCKAVDIGPGLNLLQEDNPDLIGSEIARWLSTLEISGGSGGSGGGGSGGMVFTLEDFVGDWEQTAAYNLDQVLEQGGVSSLLQNLAVSVTPIQRIVRSGENALKIDIHVIIPYEGLSADQMAQIEEVFKVVYPVDDHHFKVILPYGTLVIDGVTPNMLNYFGRPYEGIAVFDGKKITVTGTLWNGNKIIDERLITPDGSMLFRVTINSGSGHHHHHH

SEQ ID NO: 3890 - protein, 457 aa, Synthetic construct
MLHYVDVGPRDGTPVLFLHGNPTSSYVWRNIIPHVAPTHRCIAPDLIGMGKSGKPDLGYFFDDHVRFMDAFIEALGLEEVVLVIHDWGSALGFHWAKRNPERVKGIAFMEFIRPIPTWDEWPEFARETFQAFRTTDVGRKLIIDQNVIIEGTLPMGVVRPLTEVEMDHYREPFLNPVDREPLWRFPNELPIAGEPANIVALAEEYMDWLHQSPVPKLLFWGTPGVLIPPAEAARLAKSLPNCKAVDIGPGLNLLQEDNPDLIGSEIARWLSTLEISGGSGGSGGGGSGGMVFTLEDFVGDWEQTAAYNLDQVLEQGGVSSLLQNLAVSVTPIQRIVRSGENALKIDIHVIIPYEGLSADQMAQIEEVFKVVYPVDDHHFKVILPYGTLVIDGVTPNMLNYFGRPYEGIAVFDGKKITVTGTLWNGNKIIDERLITPDGSMLFRVTINSGSGHHHHHH

SEQ ID NO: 3891 - protein, 457 aa, Synthetic construct; identical to SEQ ID NO: 3667

SEQ ID NO: 3892 - protein, 457 aa, Synthetic construct; identical to SEQ ID NO: 3682

SEQ ID NO: 3893 - protein, 457 aa, Synthetic construct; identical to SEQ ID NO: 3697

SEQ ID NO: 3894 - protein, 457 aa, Synthetic construct
MFHYVDEGPRDGTPVLFLHGNPTSSYVWRNIIPHVAPTHRCIAPDLIGMGKSGKPDLGYFFDDHVRFMDAFIEALGLEEVVLVIHDWGSALGFHWAKRNPERVKGIAFMEFIRPIPTWDEWPEFARETFQAFRTTDVGRKLIIDQNVFIEGTLPMGVVRPLTEVEMDHYREPFLNPVDREPLWRFPNELPIAGEPANIVALVEEYMDWLHQSPVPKLLFWGTPGVLIPPAEAARLAKSLPNCKAVDIGPGLNLLQEDNPDLIGSEIARWLSTLEISGGSGGSGGGGSGGMVFTLEDFVGDWEQTAAYNLDQVLEQGGVSSLLQNLAVSVTPIQRIVRSGENALKIDIHVIIPYEGLSADQMAQIEEVFKVVYPVDDHHFKVILPYGTLVIDGVTPNMLNYFGRPYEGIAVFDGKKITVTGTLWNGNKIIDERLITPDGSMLFRVTINSGSGHHHHHH

SEQ ID NO: 3895 - protein, 457 aa, Synthetic construct
MFHYVDVGPRDGTPVLFLHGNPTSSYVWRNIIPHVAPTHRCIAPDLIGMGKSGKPDLGYFFDDHVRFMDAFIEALGLENVVLVIHDWGSALGFHWAKRNPERVKGIAFMEFIRPIPTWDEWPEFARETFQAFRTTDVGRKLIIDQNVFIEGTLPMGVVRPLTEVEMDHYREPFLNPVDREPLWRFPNELPIAGEPANIVALVEEYMDWLHQSPVPKLLFWGTPGVLIPPAEAARLAKSLPNCKAVDIGPGLNLLQEDNPDLIGSEIARWLSTLEISGGSGGSGGGGSGGMVFTLEDFVGDWEQTAAYNLDQVLEQGGVSSLLQNLAVSVTPIQRIVRSGENALKIDIHVIIPYEGLSADQMAQIEEVFKVVYPVDDHHFKVILPYGTLVIDGVTPNMLNYFGRPYEGIAVFDGKKITVTGTLWNGNKIIDERLITPDGSMLFRVTINSGSGHHHHHH

SEQ ID NO: 3896 - protein, 457 aa, Synthetic construct
MFHYVDVGPRDGTPVLFLHGNPTSSYVWRNIIPHVAPTHRCIAPDLIGMGKSGKPDLGYFFDDHVRFMDAFIEALGLEEVVLVVHDWGSALGFHWAKRNPERVKGIAFMEFIRPIPTWDEWPEFARETFQAFRTTDVGRKLIIDQNVFIEGTLPMGVVRPLTEVEMDHYREPFLNPVDREPLWRFPNELPIAGEPANIVALVEEYMDWLHQSPVPKLLFWGTPGVLIPPAEAARLAKSLPNCKAVDIGPGLNLLQEDNPDLIGSEIARWLSTLEISGGSGGSGGGGSGGMVFTLEDFVGDWEQTAAYNLDQVLEQGGVSSLLQNLAVSVTPIQRIVRSGENALKIDIHVIIPYEGLSADQMAQIEEVFKVVYPVDDHHFKVILPYGTLVIDGVTPNMLNYFGRPYEGIAVFDGKKITVTGTLWNGNKIIDERLITPDGSMLFRVTINSGSGHHHHHH

SEQ ID NO: 3897 - protein, 457 aa, Synthetic construct
MFHYVDVGPRDGTPVLFLHGNPTSSYVWRNIIPHVAPTHRCIAPDLIGMGKSGKPDLGYFFDDHVRFMDAFIEALGLEEVVLVIHDWGSALGLHWAKRNPERVKGIAFMEFIRPIPTWDEWPEFARETFQAFRTTDVGRKLIIDQNVFIEGTLPMGVVRPLTEVEMDHYREPFLNPVDREPLWRFPNELPIAGEPANIVALVEEYMDWLHQSPVPKLLFWGTPGVLIPPAEAARLAKSLPNCKAVDIGPGLNLLQEDNPDLIGSEIARWLSTLEISGGSGGSGGGGSGGMVFTLEDFVGDWEQTAAYNLDQVLEQGGVSSLLQNLAVSVTPIQRIVRSGENALKIDIHVIIPYEGLSADQMAQIEEVFKVVYPVDDHHFKVILPYGTLVIDGVTPNMLNYFGRPYEGIAVFDGKKITVTGTLWNGNKIIDERLITPDGSMLFRVTINSGSGHHHHHH

SEQ ID NO: 3898 - protein, 457 aa, Synthetic construct
MFHYVDVGPRDGTPVLFLHGNPTSSYVWRNIIPHVAPTHRCIAPDLIGMGKSGKPDLGYFFDDHVRFMDAFIEALGLEEVVLVIHDWGSALGFHWAKRNPERVKGIAFMEFIRPIPTWDEWPEFARETFQAFRTTDVGRKLIIDQNVFIEGTLPMGVVRPLTEVEMDHYREPFLNPVDREPLWRFPNELPIAGEPANIVAIVEEYMDWLHQSPVPKLLFWGTPGVLIPPAEAARLAKSLPNCKAVDIGPGLNLLQEDNPDLIGSEIARWLSTLEISGGSGGSGGGGSGGMVFTLEDFVGDWEQTAAYNLDQVLEQGGVSSLLQNLAVSVTPIQRIVRSGENALKIDIHVIIPYEGLSADQMAQIEEVFKVVYPVDDHHFKVILPYGTLVIDGVTPNMLNYFGRPYEGIAVFDGKKITVTGTLWNGNKIIDERLITPDGSMLFRVTINSGSGHHHHHH

SEQ ID NO: 3899 - protein, 457 aa, Synthetic construct
MFHYVDVGPRDGTPVLFLHGNPTSSYVWRNIIPHVAPTHRCIAPDLIGMGKSGKPDLGYFFDDHVRFMDAFIEALGLEEVVLVIHDWGSALGFHWAKRNPERVKGIAFMEFIRPIPTWDEWPEFARETFQAFRTTDVGRKLIIDQNVFIEGTLPMGVVRPLTEVEMDHYREPFLNPVDREPLWRFPNELPIAGEPANIVALVDEYMDWLHQSPVPKLLFWGTPGVLIPPAEAARLAKSLPNCKAVDIGPGLNLLQEDNPDLIGSEIARWLSTLEISGGSGGSGGGGSGGMVFTLEDFVGDWEQTAAYNLDQVLEQGGVSSLLQNLAVSVTPIQRIVRSGENALKIDIHVIIPYEGLSADQMAQIEEVFKVVYPVDDHHFKVILPYGTLVIDGVTPNMLNYFGRPYEGIAVFDGKKITVTGTLWNGNKIIDERLITPDGSMLFRVTINSGSGHHHHHH

SEQ ID NO: 3900 - protein, 457 aa, Synthetic construct
MFHYVDVGPRDGTPVLFLHGNPTSSYVWRNIIPHVAPTHRCIAPDLIGMGKSGKPDLGYFFDDHVRFMDAFIEALGLEEVVLVIHDWGSALGFHWAKRNPERVKGIAFMEFIRPIPTWDEWPEFARETFQAFRTTDVGRKLIIDQNVFIEGTLPMGVVRPLTEVEMDHYREPFLNPVDREPLWRFPNELPIAGEPANIVALVEEYMDWLHQSPVPKLLFWGTPGVLIPPAEAARLAKSLPNCKAVDIGPGLNLLQEDNPDLIGAEIARWLSTLEISGGSGGSGGGGSGGMVFTLEDFVGDWEQTAAYNLDQVLEQGGVSSLLQNLAVSVTPIQRIVRSGENALKIDIHVIIPYEGLSADQMAQIEEVFKVVYPVDDHHFKVILPYGTLVIDGVTPNMLNYFGRPYEGIAVFDGKKITVTGTLWNGNKIIDERLITPDGSMLFRVTINSGSGHHHHHH

SEQ ID NO: 3901 - protein, 457 aa, Synthetic construct
MFHYVDEGPRDGTPVLFLHGNPTSSYVWRNIIPHVAPTHRCIAPDLIGMGKSGKPDLGYFFDDHVRFMDAFIEALGLEEVVLVIHDWGSALGFHWAKRNPERVKGIAFMEFIRPIPTWDEWPEFARETFQAFRTTDVGRKLIIDQNVFIEGTLPMGVVRPLTEVEMDHYREPFLNPVDREPLWRFPNELPIAGEPANIVALVEEYMDWLHQSPVPKLLFWGTPGVLIPPAEAARLAKSLPNCKAVDIGPGLNLLQEDNPDLIGAEIARWLSTLEISGGSGGSGGGGSGGMVFTLEDFVGDWEQTAAYNLDQVLEQGGVSSLLQNLAVSVTPIQRIVRSGENALKIDIHVIIPYEGLSADQMAQIEEVFKVVYPVDDHHFKVILPYGTLVIDGVTPNMLNYFGRPYEGIAVFDGKKITVTGTLWNGNKIIDERLITPDGSMLFRVTINSGSGHHHHHH

SEQ ID NO: 3902 - protein, 457 aa, Synthetic construct
MFHYVDEGPRDGTPVLFLHGNPTSSYVWRNIIPHVAPTHRCIAPDLIGMGKSGKPDLGYFFDDHVRFMDAFIEALGLEEVVLVIHDWGSALGFHWAKRNPERVKGIAFMEFIRPIPTWDEWPEFARETFQAFRTTDVGRKLIIDQNVFIEGTLPMGVVRPLTEVEMDHYREPFLNPVDREPLWRFPNELPIAGEPANIVAIVEEYMDWLHQSPVPKLLFWGTPGVLIPPAEAARLAKSLPNCKAVDIGPGLNLLQEDNPDLIGSEIARWLSTLEISGGSGGSGGGGSGGMVFTLEDFVGDWEQTAAYNLDQVLEQGGVSSLLQNLAVSVTPIQRIVRSGENALKIDIHVIIPYEGLSADQMAQIEEVFKVVYPVDDHHFKVILPYGTLVIDGVTPNMLNYFGRPYEGIAVFDGKKITVTGTLWNGNKIIDERLITPDGSMLFRVTINSGSGHHHHHH

SEQ ID NO: 3903 - protein, 457 aa, Synthetic construct
MFHYVDVGPRDGTPVLFLHGNPTSSYVWRNIIPHVAPTHRCIAPDLIGMGKSGKPDLGYFFDDHVRFMDAFIEALGLENVVLVIHDWGSALGFHWAKRNPERVKGIAFMEFIRPIPTWDEWPEFARETFQAFRTTDVGRKLIIDQNVFIEGTLPMGVVRPLTEVEMDHYREPFLNPVDREPLWRFPNELPIAGEPANIVAIVEEYMDWLHQSPVPKLLFWGTPGVLIPPAEAARLAKSLPNCKAVDIGPGLNLLQEDNPDLIGSEIARWLSTLEISGGSGGSGGGGSGGMVFTLEDFVGDWEQTAAYNLDQVLEQGGVSSLLQNLAVSVTPIQRIVRSGENALKIDIHVIIPYEGLSADQMAQIEEVFKVVYPVDDHHFKVILPYGTLVIDGVTPNMLNYFGRPYEGIAVFDGKKITVTGTLWNGNKIIDERLITPDGSMLFRVTINSGSGHHHHHH

SEQ ID NO: 3904 - protein, 457 aa, Synthetic construct
MFHYVDVGPRDGTPVLFLHGNPTSSYVWRNIIPHVAPTHRCIAPDLIGMGKSGKPDLGYFFDDHVRFMDAFIEALGLEEVVLVVHDWGSALGFHWAKRNPERVKGIAFMEFIRPIPTWDEWPEFARETFQAFRTTDVGRKLIIDQNVFIEGTLPMGVVRPLTEVEMDHYREPFLNPVDREPLWRFPNELPIAGEPANIVAIVEEYMDWLHQSPVPKLLFWGTPGVLIPPAEAARLAKSLPNCKAVDIGPGLNLLQEDNPDLIGSEIARWLSTLEISGGSGGSGGGGSGGMVFTLEDFVGDWEQTAAYNLDQVLEQGGVSSLLQNLAVSVTPIQRIVRSGENALKIDIHVIIPYEGLSADQMAQIEEVFKVVYPVDDHHFKVILPYGTLVIDGVTPNMLNYFGRPYEGIAVFDGKKITVTGTLWNGNKIIDERLITPDGSMLFRVTINSGSGHHHHHH

SEQ ID NO: 3905 - protein, 457 aa, Synthetic construct
MFHYVDVGPRDGTPVLFLHGNPTSSYVWRNIIPHVAPTHRCIAPDLIGMGKSGKPDLGYFFDDHVRFMDAFIEALGLEEVVLVIHDWGSALGLHWAKRNPERVKGIAFMEFIRPIPTWDEWPEFARETFQAFRTTDVGRKLIIDQNVFIEGTLPMGVVRPLTEVEMDHYREPFLNPVDREPLWRFPNELPIAGEPANIVAIVEEYMDWLHQSPVPKLLFWGTPGVLIPPAEAARLAKSLPNCKAVDIGPGLNLLQEDNPDLIGSEIARWLSTLEISGGSGGSGGGGSGGMVFTLEDFVGDWEQTAAYNLDQVLEQGGVSSLLQNLAVSVTPIQRIVRSGENALKIDIHVIIPYEGLSADQMAQIEEVFKVVYPVDDHHFKVILPYGTLVIDGVTPNMLNYFGRPYEGIAVFDGKKITVTGTLWNGNKIIDERLITPDGSMLFRVTINSGSGHHHHHH

SEQ ID NO: 3906 - protein, 457 aa, Synthetic construct
MFHYVDVGPRDGTPVLFLHGNPTSSYVWRNIIPHVAPTHRCIAPDLIGMGKSGKPDLGYFFDDHVRFMDAFIEALGLEEVVLVIHDWGSALGFHWAKRNPERVKGIAFMEFIRPIGTWDEWPEFARETFQAFRTTDVGRKLIIDQNVFIEGTLPMGVVRPLTEVEMDHYREPFLNPVDREPLWRFPNELPIAGEPANIVAIVEEYMDWLHQSPVPKLLFWGTPGVLIPPAEAARLAKSLPNCKAVDIGPGLNLLQEDNPDLIGSEIARWLSTLEISGGSGGSGGGGSGGMVFTLEDFVGDWEQTAAYNLDQVLEQGGVSSLLQNLAVSVTPIQRIVRSGENALKIDIHVIIPYEGLSADQMAQIEEVFKVVYPVDDHHFKVILPYGTLVIDGVTPNMLNYFGRPYEGIAVFDGKKITVTGTLWNGNKIIDERLITPDGSMLFRVTINSGSGHHHHHH

SEQ ID NO: 3907 - protein, 457 aa, Synthetic construct
MFHYVDVGPRDGTPVLFLHGNPTSSYVWRNIIPHVAPTHRCIAPDLIGMGKSGKPDLGYFFDDHVRFMDAFIEALGLEEVVLVIHDWGSALGFHWAKRNPERVKGIAFMEFIRPIPDWDEWPEFARETFQAFRTTDVGRKLIIDQNVFIEGTLPMGVVRPLTEVEMDHYREPFLNPVDREPLWRFPNELPIAGEPANIVAIVEEYMDWLHQSPVPKLLFWGTPGVLIPPAEAARLAKSLPNCKAVDIGPGLNLLQEDNPDLIGSEIARWLSTLEISGGSGGSGGGGSGGMVFTLEDFVGDWEQTAAYNLDQVLEQGGVSSLLQNLAVSVTPIQRIVRSGENALKIDIHVIIPYEGLSADQMAQIEEVFKVVYPVDDHHFKVILPYGTLVIDGVTPNMLNYFGRPYEGIAVFDGKKITVTGTLWNGNKIIDERLITPDGSMLFRVTINSGSGHHHHHH

SEQ ID NO: 3908 - protein, 457 aa, Synthetic construct
MFHYVDVGPRDGTPVLFLHGNPTSSYVWRNIIPHVAPTHRCIAPDLIGMGKSGKPDLGYFFDDHVRFMDAFIEALGLEEVVLVIHDWGSALGFHWAKRNPERVKGIAFMEFIRPIPTWDEWPEFARETFQRFRTTDVGRKLIIDQNVFIEGTLPMGVVRPLTEVEMDHYREPFLNPVDREPLWRFPNELPIAGEPANIVAIVEEYMDWLHQSPVPKLLFWGTPGVLIPPAEAARLAKSLPNCKAVDIGPGLNLLQEDNPDLIGSEIARWLSTLEISGGSGGSGGGGSGGMVFTLEDFVGDWEQTAAYNLDQVLEQGGVSSLLQNLAVSVTPIQRIVRSGENALKIDIHVIIPYEGLSADQMAQIEEVFKVVYPVDDHHFKVILPYGTLVIDGVTPNMLNYFGRPYEGIAVFDGKKITVTGTLWNGNKIIDERLITPDGSMLFRVTINSGSGHHHHHH

SEQ ID NO: 3909 - protein, 457 aa, Synthetic construct
MFHYVDVGPRDGTPVLFLHGNPTSSYVWRNIIPHVAPTHRCIAPDLIGMGKSGKPDLGYFFDDHVRFMDAFIEALGLEEVVLVIHDWGSALGFHWAKRNPERVKGIAFMEFIRPIPTWDEWPEFARETFQAFRTTDVGRELIIDQNVFIEGTLPMGVVRPLTEVEMDHYREPFLNPVDREPLWRFPNELPIAGEPANIVAIVEEYMDWLHQSPVPKLLFWGTPGVLIPPAEAARLAKSLPNCKAVDIGPGLNLLQEDNPDLIGSEIARWLSTLEISGGSGGSGGGGSGGMVFTLEDFVGDWEQTAAYNLDQVLEQGGVSSLLQNLAVSVTPIQRIVRSGENALKIDIHVIIPYEGLSADQMAQIEEVFKVVYPVDDHHFKVILPYGTLVIDGVTPNMLNYFGRPYEGIAVFDGKKITVTGTLWNGNKIIDERLITPDGSMLFRVTINSGSGHHHHHH

SEQ ID NO: 3910 - protein, 457 aa, Synthetic construct
MFHYVDEGPRDGTPVLFLHGNPTSSYVWRNIIPHVAPTHRCIAPDLIGMGKSGKPDLGYFFDDHVRFMDAFIEALGLEEVVLVIHDWGSALGFHWAKRNPERVKGIAFMEFIRPIPTWDEWPEFARETFQAFRTTDVGRKLIIDQNVFIEGTLPMGVVRPLTEVEMDHYREPFLNPVDREPLWRFPNELPIAGEPANIVALVDEYMDWLHQSPVPKLLFWGTPGVLIPPAEAARLAKSLPNCKAVDIGPGLNLLQEDNPDLIGSEIARWLSTLEISGGSGGSGGGGSGGMVFTLEDFVGDWEQTAAYNLDQVLEQGGVSSLLQNLAVSVTPIQRIVRSGENALKIDIHVIIPYEGLSADQMAQIEEVFKVVYPVDDHHFKVILPYGTLVIDGVTPNMLNYFGRPYEGIAVFDGKKITVTGTLWNGNKIIDERLITPDGSMLFRVTINSGSGHHHHHH

SEQ ID NO: 3911 - protein, 457 aa, Synthetic construct
MFHYVDVGPRDGTPVLFLHGNPTSSYVWRNIIPHVAPTHRCIAPDLIGMGKSGKPDLGYFFDDHVRFMDAFIEALGLENVVLVIHDWGSALGFHWAKRNPERVKGIAFMEFIRPIPTWDEWPEFARETFQAFRTTDVGRKLIIDQNVFIEGTLPMGVVRPLTEVEMDHYREPFLNPVDREPLWRFPNELPIAGEPANIVALVDEYMDWLHQSPVPKLLFWGTPGVLIPPAEAARLAKSLPNCKAVDIGPGLNLLQEDNPDLIGSEIARWLSTLEISGGSGGSGGGGSGGMVFTLEDFVGDWEQTAAYNLDQVLEQGGVSSLLQNLAVSVTPIQRIVRSGENALKIDIHVIIPYEGLSADQMAQIEEVFKVVYPVDDHHFKVILPYGTLVIDGVTPNMLNYFGRPYEGIAVFDGKKITVTGTLWNGNKIIDERLITPDGSMLFRVTINSGSGHHHHHH

SEQ ID NO: 3912 - protein, 457 aa, Synthetic construct
MFHYVDVGPRDGTPVLFLHGNPTSSYVWRNIIPHVAPTHRCIAPDLIGMGKSGKPDLGYFFDDHVRFMDAFIEALGLEEVVLVVHDWGSALGFHWAKRNPERVKGIAFMEFIRPIPTWDEWPEFARETFQAFRTTDVGRKLIIDQNVFIEGTLPMGVVRPLTEVEMDHYREPFLNPVDREPLWRFPNELPIAGEPANIVALVDEYMDWLHQSPVPKLLFWGTPGVLIPPAEAARLAKSLPNCKAVDIGPGLNLLQEDNPDLIGSEIARWLSTLEISGGSGGSGGGGSGGMVFTLEDFVGDWEQTAAYNLDQVLEQGGVSSLLQNLAVSVTPIQRIVRSGENALKIDIHVIIPYEGLSADQMAQIEEVFKVVYPVDDHHFKVILPYGTLVIDGVTPNMLNYFGRPYEGIAVFDGKKITVTGTLWNGNKIIDERLITPDGSMLFRVTINSGSGHHHHHH

SEQ ID NO: 3913 - protein, 457 aa, Synthetic construct
MFHYVDVGPRDGTPVLFLHGNPTSSYVWRNIIPHVAPTHRCIAPDLIGMGKSGKPDLGYFFDDHVRFMDAFIEALGLEEVVLVIHDWGSALGLHWAKRNPERVKGIAFMEFIRPIPTWDEWPEFARETFQAFRTTDVGRKLIIDQNVFIEGTLPMGVVRPLTEVEMDHYREPFLNPVDREPLWRFPNELPIAGEPANIVALVDEYMDWLHQSPVPKLLFWGTPGVLIPPAEAARLAKSLPNCKAVDIGPGLNLLQEDNPDLIGSEIARWLSTLEISGGSGGSGGGGSGGMVFTLEDFVGDWEQTAAYNLDQVLEQGGVSSLLQNLAVSVTPIQRIVRSGENALKIDIHVIIPYEGLSADQMAQIEEVFKVVYPVDDHHFKVILPYGTLVIDGVTPNMLNYFGRPYEGIAVFDGKKITVTGTLWNGNKIIDERLITPDGSMLFRVTINSGSGHHHHHH

SEQ ID NO: 3914 - protein, 457 aa, Synthetic construct
MFHYVDVGPRDGTPVLFLHGNPTSSYVWRNIIPHVAPTHRCIAPDLIGMGKSGKPDLGYFFDDHVRFMDAFIEALGLEEVVLVIHDWGSALGFHWAKRNPERVKGIAFMEFIRPIGTWDEWPEFARETFQAFRTTDVGRKLIIDQNVFIEGTLPMGVVRPLTEVEMDHYREPFLNPVDREPLWRFPNELPIAGEPANIVALVDEYMDWLHQSPVPKLLFWGTPGVLIPPAEAARLAKSLPNCKAVDIGPGLNLLQEDNPDLIGSEIARWLSTLEISGGSGGSGGGGSGGMVFTLEDFVGDWEQTAAYNLDQVLEQGGVSSLLQNLAVSVTPIQRIVRSGENALKIDIHVIIPYEGLSADQMAQIEEVFKVVYPVDDHHFKVILPYGTLVIDGVTPNMLNYFGRPYEGIAVFDGKKITVTGTLWNGNKIIDERLITPDGSMLFRVTINSGSGHHHHHH

SEQ ID NO: 3915 - protein, 457 aa, Synthetic construct
MFHYVDVGPRDGTPVLFLHGNPTSSYVWRNIIPHVAPTHRCIAPDLIGMGKSGKPDLGYFFDDHVRFMDAFIEALGLEEVVLVIHDWGSALGFHWAKRNPERVKGIAFMEFIRPIPDWDEWPEFARETFQAFRTTDVGRKLIIDQNVFIEGTLPMGVVRPLTEVEMDHYREPFLNPVDREPLWRFPNELPIAGEPANIVALVDEYMDWLHQSPVPKLLFWGTPGVLIPPAEAARLAKSLPNCKAVDIGPGLNLLQEDNPDLIGSEIARWLSTLEISGGSGGSGGGGSGGMVFTLEDFVGDWEQTAAYNLDQVLEQGGVSSLLQNLAVSVTPIQRIVRSGENALKIDIHVIIPYEGLSADQMAQIEEVFKVVYPVDDHHFKVILPYGTLVIDGVTPNMLNYFGRPYEGIAVFDGKKITVTGTLWNGNKIIDERLITPDGSMLFRVTINSGSGHHHHHH

SEQ ID NO: 3916 - protein, 457 aa, Synthetic construct
MFHYVDVGPRDGTPVLFLHGNPTSSYVWRNIIPHVAPTHRCIAPDLIGMGKSGKPDLGYFFDDHVRFMDAFIEALGLEEVVLVIHDWGSALGFHWAKRNPERVKGIAFMEFIRPIPTWDEWPEFARETFQRFRTTDVGRKLIIDQNVFIEGTLPMGVVRPLTEVEMDHYREPFLNPVDREPLWRFPNELPIAGEPANIVALVDEYMDWLHQSPVPKLLFWGTPGVLIPPAEAARLAKSLPNCKAVDIGPGLNLLQEDNPDLIGSEIARWLSTLEISGGSGGSGGGGSGGMVFTLEDFVGDWEQTAAYNLDQVLEQGGVSSLLQNLAVSVTPIQRIVRSGENALKIDIHVIIPYEGLSADQMAQIEEVFKVVYPVDDHHFKVILPYGTLVIDGVTPNMLNYFGRPYEGIAVFDGKKITVTGTLWNGNKIIDERLITPDGSMLFRVTINSGSGHHHHHH

SEQ ID NO: 3917 - protein, 457 aa, Synthetic construct
MFHYVDEGPRDGTPVLFLHGNPTSSYVWRNIIPHVAPTHRCIAPDLIGMGKSGKPDLGYFFDDHVRFMDAFIEALGLEEVVLVIHDWGSALGFHWAKRNPERVKGIAFMEFIRPIPTWDEWPEFARETFQAFRTTDVGRKLIIDQNVFIEGTLPMGVVRPLTEVEMDHYREPFLNPVDREPLWRFPNELPIAGEPANIVAIVDEYMDWLHQSPVPKLLFWGTPGVLIPPAEAARLAKSLPNCKAVDIGPGLNLLQEDNPDLIGSEIARWLSTLEISGGSGGSGGGGSGGMVFTLEDFVGDWEQTAAYNLDQVLEQGGVSSLLQNLAVSVTPIQRIVRSGENALKIDIHVIIPYEGLSADQMAQIEEVFKVVYPVDDHHFKVILPYGTLVIDGVTPNMLNYFGRPYEGIAVFDGKKITVTGTLWNGNKIIDERLITPDGSMLFRVTINSGSGHHHHHH

SEQ ID NO: 3918 - protein, 457 aa, Synthetic construct
MFHYVDVGPRDGTPVLFLHGNPTSSYVWRNIIPHVAPTHRCIAPDLIGMGKSGKPDLGYFFDDHVRFMDAFIEALGLENVVLVIHDWGSALGFHWAKRNPERVKGIAFMEFIRPIPTWDEWPEFARETFQAFRTTDVGRKLIIDQNVFIEGTLPMGVVRPLTEVEMDHYREPFLNPVDREPLWRFPNELPIAGEPANIVAIVDEYMDWLHQSPVPKLLFWGTPGVLIPPAEAARLAKSLPNCKAVDIGPGLNLLQEDNPDLIGSEIARWLSTLEISGGSGGSGGGGSGGMVFTLEDFVGDWEQTAAYNLDQVLEQGGVSSLLQNLAVSVTPIQRIVRSGENALKIDIHVIIPYEGLSADQMAQIEEVFKVVYPVDDHHFKVILPYGTLVIDGVTPNMLNYFGRPYEGIAVFDGKKITVTGTLWNGNKIIDERLITPDGSMLFRVTINSGSGHHHHHH

SEQ ID NO: 3919 - protein, 457 aa, Synthetic construct
MFHYVDVGPRDGTPVLFLHGNPTSSYVWRNIIPHVAPTHRCIAPDLIGMGKSGKPDLGYFFDDHVRFMDAFIEALGLEEVVLVVHDWGSALGFHWAKRNPERVKGIAFMEFIRPIPTWDEWPEFARETFQAFRTTDVGRKLIIDQNVFIEGTLPMGVVRPLTEVEMDHYREPFLNPVDREPLWRFPNELPIAGEPANIVAIVDEYMDWLHQSPVPKLLFWGTPGVLIPPAEAARLAKSLPNCKAVDIGPGLNLLQEDNPDLIGSEIARWLSTLEISGGSGGSGGGGSGGMVFTLEDFVGDWEQTAAYNLDQVLEQGGVSSLLQNLAVSVTPIQRIVRSGENALKIDIHVIIPYEGLSADQMAQIEEVFKVVYPVDDHHFKVILPYGTLVIDGVTPNMLNYFGRPYEGIAVFDGKKITVTGTLWNGNKIIDERLITPDGSMLFRVTINSGSGHHHHHH

SEQ ID NO: 3920 - protein, 457 aa, Synthetic construct
MFHYVDVGPRDGTPVLFLHGNPTSSYVWRNIIPHVAPTHRCIAPDLIGMGKSGKPDLGYFFDDHVRFMDAFIEALGLEEVVLVIHDWGSALGLHWAKRNPERVKGIAFMEFIRPIPTWDEWPEFARETFQAFRTTDVGRKLIIDQNVFIEGTLPMGVVRPLTEVEMDHYREPFLNPVDREPLWRFPNELPIAGEPANIVAIVDEYMDWLHQSPVPKLLFWGTPGVLIPPAEAARLAKSLPNCKAVDIGPGLNLLQEDNPDLIGSEIARWLSTLEISGGSGGSGGGGSGGMVFTLEDFVGDWEQTAAYNLDQVLEQGGVSSLLQNLAVSVTPIQRIVRSGENALKIDIHVIIPYEGLSADQMAQIEEVFKVVYPVDDHHFKVILPYGTLVIDGVTPNMLNYFGRPYEGIAVFDGKKITVTGTLWNGNKIIDERLITPDGSMLFRVTINSGSGHHHHHH

SEQ ID NO: 3921 - protein, 457 aa, Synthetic construct
MFHYVDVGPRDGTPVLFLHGNPTSSYVWRNIIPHVAPTHRCIAPDLIGMGKSGKPDLGYFFDDHVRFMDAFIEALGLEEVVLVIHDWGSALGFHWAKRNPERVKGIAFMEFIRPIGTWDEWPEFARETFQAFRTTDVGRKLIIDQNVFIEGTLPMGVVRPLTEVEMDHYREPFLNPVDREPLWRFPNELPIAGEPANIVAIVDEYMDWLHQSPVPKLLFWGTPGVLIPPAEAARLAKSLPNCKAVDIGPGLNLLQEDNPDLIGSEIARWLSTLEISGGSGGSGGGGSGGMVFTLEDFVGDWEQTAAYNLDQVLEQGGVSSLLQNLAVSVTPIQRIVRSGENALKIDIHVIIPYEGLSADQMAQIEEVFKVVYPVDDHHFKVILPYGTLVIDGVTPNMLNYFGRPYEGIAVFDGKKITVTGTLWNGNKIIDERLITPDGSMLFRVTINSGSGHHHHHH

SEQ ID NO: 3922 - protein, 457 aa, Synthetic construct
MFHYVDVGPRDGTPVLFLHGNPTSSYVWRNIIPHVAPTHRCIAPDLIGMGKSGKPDLGYFFDDHVRFMDAFIEALGLEEVVLVIHDWGSALGFHWAKRNPERVKGIAFMEFIRPIPDWDEWPEFARETFQAFRTTDVGRKLIIDQNVFIEGTLPMGVVRPLTEVEMDHYREPFLNPVDREPLWRFPNELPIAGEPANIVAIVDEYMDWLHQSPVPKLLFWGTPGVLIPPAEAARLAKSLPNCKAVDIGPGLNLLQEDNPDLIGSEIARWLSTLEISGGSGGSGGGGSGGMVFTLEDFVGDWEQTAAYNLDQVLEQGGVSSLLQNLAVSVTPIQRIVRSGENALKIDIHVIIPYEGLSADQMAQIEEVFKVVYPVDDHHFKVILPYGTLVIDGVTPNMLNYFGRPYEGIAVFDGKKITVTGTLWNGNKIIDERLITPDGSMLFRVTINSGSGHHHHHH

SEQ ID NO: 3923 - protein, 457 aa, Synthetic construct
MFHYVDVGPRDGTPVLFLHGNPTSSYVWRNIIPHVAPTHRCIAPDLIGMGKSGKPDLGYFFDDHVRFMDAFIEALGLEEVVLVIHDWGSALGFHWAKRNPERVKGIAFMEFIRPIPTWDEWPEFARETFQRFRTTDVGRKLIIDQNVFIEGTLPMGVVRPLTEVEMDHYREPFLNPVDREPLWRFPNELPIAGEPANIVAIVDEYMDWLHQSPVPKLLFWGTPGVLIPPAEAARLAKSLPNCKAVDIGPGLNLLQEDNPDLIGSEIARWLSTLEISGGSGGSGGGGSGGMVFTLEDFVGDWEQTAAYNLDQVLEQGGVSSLLQNLAVSVTPIQRIVRSGENALKIDIHVIIPYEGLSADQMAQIEEVFKVVYPVDDHHFKVILPYGTLVIDGVTPNMLNYFGRPYEGIAVFDGKKITVTGTLWNGNKIIDERLITPDGSMLFRVTINSGSGHHHHHH

SEQ ID NO: 3924 - protein, 457 aa, Synthetic construct
MFHYVDVGPRDGTPVLFLHGNPTSSYVWRNIIPHVAPTHRCIAPDLIGMGKSGKPDLGYFFDDHVRFMDAFIEALGLEEVVLVVHDWGSALGLHWAKRNPERVKGIAFMEFIRPIPTWDEWPEFARETFQAFRTTDVGRELIIDQNVFIEGTLPMGVVRPLTEVEMDHYREPFLNPVDREPLWRFPNELPIAGEPANIVAIVEEYMDWLHQSPVPKLLFWGTPGVLIPPAEAARLAKSLPNCKAVDIGPGLNLLQEDNPDLIGSEIARWLSTLEISGGSGGSGGGGSGGMVFTLEDFVGDWEQTAAYNLDQVLEQGGVSSLLQNLAVSVTPIQRIVRSGENALKIDIHVIIPYEGLSADQMAQIEEVFKVVYPVDDHHFKVILPYGTLVIDGVTPNMLNYFGRPYEGIAVFDGKKITVTGTLWNGNKIIDERLITPDGSMLFRVTINSGSGHHHHHH

SEQ ID NO: 3925 - protein, 457 aa, Synthetic construct
MFHYVDVGPRDGTPVLFLHGNPTSSYVWRNIIPHVAPTHRCIAPDLIGMGKSGKPDLGYFFDDHVRFMDAFIEALGLEEVVLVVHDWGSALGLHWAKRNPERVKGIAFMEFIRPIGTWDEWPEFARETFQAFRTTDVGRKLIIDQNVFIEGTLPMGVVRPLTEVEMDHYREPFLNPVDREPLWRFPNELPIAGEPANIVAIVEEYMDWLHQSPVPKLLFWGTPGVLIPPAEAARLAKSLPNCKAVDIGPGLNLLQEDNPDLIGSEIARWLSTLEISGGSGGSGGGGSGGMVFTLEDFVGDWEQTAAYNLDQVLEQGGVSSLLQNLAVSVTPIQRIVRSGENALKIDIHVIIPYEGLSADQMAQIEEVFKVVYPVDDHHFKVILPYGTLVIDGVTPNMLNYFGRPYEGIAVFDGKKITVTGTLWNGNKIIDERLITPDGSMLFRVTINSGSGHHHHHH

SEQ ID NO: 3926 - protein, 457 aa, Synthetic construct
MFHYVDVGPRDGTPVLFLHGNPTSSYVWRNIIPHVAPTHRCIAPDLIGMGKSGKPDLGYFFDDHVRFMDAFIEALGLEEVVLVIHDWGSALGFHWAKRNPERVKGIAFMEFIRPIGTWDEWPEFARETFQRFRTTDVGRKLIIDQNVFIEGTLPMGVVRPLTEVEMDHYREPFLNPVDREPLWRFPNELPIAGEPANIVAIVEEYMDWLHQSPVPKLLFWGTPGVLIPPAEAARLAKSLPNCKAVDIGPGLNLLQEDNPDLIGSEIARWLSTLEISGGSGGSGGGGSGGMVFTLEDFVGDWEQTAAYNLDQVLEQGGVSSLLQNLAVSVTPIQRIVRSGENALKIDIHVIIPYEGLSADQMAQIEEVFKVVYPVDDHHFKVILPYGTLVIDGVTPNMLNYFGRPYEGIAVFDGKKITVTGTLWNGNKIIDERLITPDGSMLFRVTINSGSGHHHHHH

SEQ ID NO: 3927 - protein, 457 aa, Synthetic construct
MFHYVDVGPRDGTPVLFLHGNPTSSYVWRNIIPHVAPTHRCIAPDLIGMGKSGKPDLGYFFDDHVRFMDAFIEALGLEEVVLVVHDWGSALGLHWAKRNPERVKGIAFMEFIRPIPTWDEWPEFARETFQAFRTTDVGRELIIDQNVFIEGTLPMGVVRPLTEVEMDHYREPFLNPVDREPLWRFPNELPIAGEPANIVALVEEYMDWLHQSPVPKLLFWGTPGVLIPPAEAARLAKSLPNCKAVDIGPGLNLLQEDNPDLIGSEIARWLSTLEISGGSGGSGGGGSGGMVFTLEDFVGDWEQTAAYNLDQVLEQGGVSSLLQNLAVSVTPIQRIVRSGENALKIDIHVIIPYEGLSADQMAQIEEVFKVVYPVDDHHFKVILPYGTLVIDGVTPNMLNYFGRPYEGIAVFDGKKITVTGTLWNGNKIIDERLITPDGSMLFRVTINSGSGHHHHHH

SEQ ID NO: 3928 - protein, 457 aa, Synthetic construct
MFHYVDVGPRDGTPVLFLHGNPTSSYVWRNIIPHVAPTHRCIAPDLIGMGKSGKPDLGYFFDDHVRFMDAFIEALGLEEVVLVVHDWGSALGLHWAKRNPERVKGIAFMEFIRPIGTWDEWPEFARETFQAFRTTDVGRKLIIDQNVFIEGTLPMGVVRPLTEVEMDHYREPFLNPVDREPLWRFPNELPIAGEPANIVALVEEYMDWLHQSPVPKLLFWGTPGVLIPPAEAARLAKSLPNCKAVDIGPGLNLLQEDNPDLIGSEIARWLSTLEISGGSGGSGGGGSGGMVFTLEDFVGDWEQTAAYNLDQVLEQGGVSSLLQNLAVSVTPIQRIVRSGENALKIDIHVIIPYEGLSADQMAQIEEVFKVVYPVDDHHFKVILPYGTLVIDGVTPNMLNYFGRPYEGIAVFDGKKITVTGTLWNGNKIIDERLITPDGSMLFRVTINSGSGHHHHHH

SEQ ID NO: 3929 - protein, 457 aa, Synthetic construct
MFHYVDVGPRDGTPVLFLHGNPTSSYVWRNIIPHVAPTHRCIAPDLIGMGKSGKPDLGYFFDDHVRFMDAFIEALGLEEVVLVIHDWGSALGFHWAKRNPERVKGIAFMEFIRPIGTWDEWPEFARETFQRFRTTDVGRKLIIDQNVFIEGTLPMGVVRPLTEVEMDHYREPFLNPVDREPLWRFPNELPIAGEPANIVALVEEYMDWLHQSPVPKLLFWGTPGVLIPPAEAARLAKSLPNCKAVDIGPGLNLLQEDNPDLIGSEIARWLSTLEISGGSGGSGGGGSGGMVFTLEDFVGDWEQTAAYNLDQVLEQGGVSSLLQNLAVSVTPIQRIVRSGENALKIDIHVIIPYEGLSADQMAQIEEVFKVVYPVDDHHFKVILPYGTLVIDGVTPNMLNYFGRPYEGIAVFDGKKITVTGTLWNGNKIIDERLITPDGSMLFRVTINSGSGHHHHHH

SEQ ID NO: 3930 - protein, 457 aa, Synthetic construct
MFHYVDEGPRDGTPVLFLHGNPTSSYVWRNIIPHVAPTHRCIAPDLIGMGKSDKPDLGYFFDDHVRFMDAFIEALGLEEVVLVIHDWGSALGFHWAKRNPERVKGIAFMEFIRPIPTWDEWPEFARETFQAFRTTDVGRELIIDQNVFIEGTLPMGVVRPLTEVEMDHYREPFLNPVDREPLWRFPNELPIAGEPANIVALVEEYMDWLHQSPVPKLLFWGTPGVLIPPAEAARLAKSLPNCKAVDIGPGLNLLQEDNPDLIGSEIARWLSTLEISGGSGGSGGGGSGGMVFTLEDFVGDWEQTAAYNLDQVLEQGGVSSLLQNLAVSVTPIQRIVRSGENALKIDIHVIIPYEGLSADQMAQIEEVFKVVYPVDDHHFKVILPYGTLVIDGVTPNMLNYFGRPYEGIAVFDGKKITVTGTLWNGNKIIDERLITPDGSMLFRVTINSGSGHHHHHH

SEQ ID NO: 3931 - protein, 457 aa, Synthetic construct
MFHYVDVGPRDGTPVLFLHGNPTSSYVWRNIIPHVASTHRCIAPDLIGMGKSDKPDLGYFFDDHVRFMDAFIEALGLEEVVLVIHDWGSALGFHWAKRNPERVKGIAFMEFIRPIPTWDEWPEFARETFQAFRTTDVGRELIIDQNVFIEGTLPMGVVRPLTEVEMDHYREPFLNPVDREPLWRFPNELPIAGEPANIVALVEEYMDWLHQSPVPKLLFWGTPGVLIPPAEAARLAKSLPNCKAVDIGPGLNLLQEDNPDLIGSEIARWLSTLEISGGSGGSGGGGSGGMVFTLEDFVGDWEQTAAYNLDQVLEQGGVSSLLQNLAVSVTPIQRIVRSGENALKIDIHVIIPYEGLSADQMAQIEEVFKVVYPVDDHHFKVILPYGTLVIDGVTPNMLNYFGRPYEGIAVFDGKKITVTGTLWNGNKIIDERLITPDGSMLFRVTINSGSGHHHHHH

SEQ ID NO: 3932 - protein, 457 aa, Synthetic construct
MFHYVDVGPRDGTPVLFLHGNPTSSYVWRNIIPHVAPTHRCIAPDLIGMGKSGKPDLGYFFDDHVRFMDAFIEALGLEEVVLVIHDWGSALGFHWAKRNPERVKGIAFMEFIRPIPTWDEWPEFARETFQAFRTTDVGRELIIDQNVFIEGTLPMGVVRPLTEVEMDHYREPFLNPADREPLWRFPNELPIAGEPANIVALVEEYMDWLHQSPVPKLLFWGTPGVLIPPAEAARLAKSLPNCKAVDIGPGLNLLQEDNPDLIGSEIARWLSTLEISGGSGGSGGGGSGGMVFTLEDFVGDWEQTAAYNLDQVLEQGGVSSLLQNLAVSVTPIQRIVRSGENALKIDIHVIIPYEGLSADQMAQIEEVFKVVYPVDDHHFKVILPYGTLVIDGVTPNMLNYFGRPYEGIAVFDGKKITVTGTLWNGNKIIDERLITPDGSMLFRVTINSGSGHHHHHH

SEQ ID NO: 3933 - protein, 457 aa, Synthetic construct
MFHYVDVGPRDGTPVLFLHGNPTSSYVWRNIIPHVAPTHRCIAPDLIGMGKSGKPDLGYFFDDHVRFMDAFIEALGLEKVVLVIHDWGSALGFHWAKRNPERVKGIAFMEFIRPIPTWDEWPEFARETFQAFRTTDVGRELIIDQNVFIEGTLPMGVVRPLTEVEMDHYREPFLNPVDREPLWRFPNELPIAGEPANIVALVEEYMDWLHQSPVPKLLFWGTPGVLIPPAEAARLAKSLPNCKAVDIGPGLNLLQEDNPDLIGSEIARWLSTLEISGGSGGSGGGGSGGMVFTLEDFVGDWEQTAAYNLDQVLEQGGVSSLLQNLAVSVTPIQRIVRSGENALKIDIHVIIPYEGLSADQMAQIEEVFKVVYPVDDHHFKVILPYGTLVIDGVTPNMLNYFGRPYEGIAVFDGKKITVTGTLWNGNKIIDERLITPDGSMLFRVTINSGSGHHHHHH

SEQ ID NO: 3934 - protein, 457 aa, Synthetic construct
MFHYVDVGPRDGTPVLFLHGNPTSSYVWRNIIPHVAPTHRCIAPDLIGMGKSDKPDLEYFFDDHVRFMDAFIEALGLEEVVLVIHDWGSALGFHWAKRNPERVKGIAFMEFIRPIPTWDEWPEFARETFQAFRTTDVGRELIIDQNVFIEGTLPMGVVRPLTEVEMDHYREPFLNPVDREPLWRFPNELPIAGEPANIVALVEEYMDWLHQSPVPKLLFWGTPGVLIPPAEAARLAKSLPNCKAVDIGPGLNLLQEDNPDLIGSEIARWLSTLEISGGSGGSGGGGSGGMVFTLEDFVGDWEQTAAYNLDQVLEQGGVSSLLQNLAVSVTPIQRIVRSGENALKIDIHVIIPYEGLSADQMAQIEEVFKVVYPVDDHHFKVILPYGTLVIDGVTPNMLNYFGRPYEGIAVFDGKKITVTGTLWNGNKIIDERLITPDGSMLFRVTINSGSGHHHHHH

SEQ ID NO: 3935 - protein, 457 aa, Synthetic construct
MFHYVDVGPRDGTPVLFLHGNPTSSYVWRNIIPHVAPTHRCIAPDLIGMGKSDKPDLGYFFDDHVRFMDAFIEALGLEEVVLVIHDWGSALGFHWAKRNPERVKGIAFMEFIRPISTWDEWPEFARETFQAFRTTDVGRELIIDQNVFIEGTLPMGVVRPLTEVEMDHYREPFLNPVDREPLWRFPNELPIAGEPANIVALVEEYMDWLHQSPVPKLLFWGTPGVLIPPAEAARLAKSLPNCKAVDIGPGLNLLQEDNPDLIGSEIARWLSTLEISGGSGGSGGGGSGGMVFTLEDFVGDWEQTAAYNLDQVLEQGGVSSLLQNLAVSVTPIQRIVRSGENALKIDIHVIIPYEGLSADQMAQIEEVFKVVYPVDDHHFKVILPYGTLVIDGVTPNMLNYFGRPYEGIAVFDGKKITVTGTLWNGNKIIDERLITPDGSMLFRVTINSGSGHHHHHH

SEQ ID NO: 3936 - protein, 457 aa, Synthetic construct
MFHYVDVGPRDGTPVLFLHGNPTSSYVWRNIIPHVAPTHRCIAPDLIGMGKSDKPDLGYFFDDHVRFMDAFIEALGLEEVVLVIHDWGSALGFHWAKRNPERVKGIAFMEFIRPIPTWDEWPEFARETFQAFRTDDVGRELIIDQNVFIEGTLPMGVVRPLTEVEMDHYREPFLNPVDREPLWRFPNELPIAGEPANIVALVEEYMDWLHQSPVPKLLFWGTPGVLIPPAEAARLAKSLPNCKAVDIGPGLNLLQEDNPDLIGSEIARWLSTLEISGGSGGSGGGGSGGMVFTLEDFVGDWEQTAAYNLDQVLEQGGVSSLLQNLAVSVTPIQRIVRSGENALKIDIHVIIPYEGLSADQMAQIEEVFKVVYPVDDHHFKVILPYGTLVIDGVTPNMLNYFGRPYEGIAVFDGKKITVTGTLWNGNKIIDERLITPDGSMLFRVTINSGSGHHHHHH

SEQ ID NO: 3937 - protein, 457 aa, Synthetic construct
MFHYVDVGPRDGTPVLFLHGNPTSSYVWRNIIPHVAPTHRCIAPDLIGMGKSDKPDLGYFFDDHVRFMDAFIEALGLEEVVLVIHDWGSALGFHWAKRNPERVKGIAFMEFIRPIPTWDEWPEFARETFQAFRTTDVGRELIIDQNVFIEGTLPMGVVRPLTEVHMDHYREPFLNPVDREPLWRFPNELPIAGEPANIVALVEEYMDWLHQSPVPKLLFWGTPGVLIPPAEAARLAKSLPNCKAVDIGPGLNLLQEDNPDLIGSEIARWLSTLEISGGSGGSGGGGSGGMVFTLEDFVGDWEQTAAYNLDQVLEQGGVSSLLQNLAVSVTPIQRIVRSGENALKIDIHVIIPYEGLSADQMAQIEEVFKVVYPVDDHHFKVILPYGTLVIDGVTPNMLNYFGRPYEGIAVFDGKKITVTGTLWNGNKIIDERLITPDGSMLFRVTINSGSGHHHHHH

SEQ ID NO: 3938 - protein, 457 aa, Synthetic construct
MFHYVDVGPRDGTPVLFLHGNPTSSYVWRNIIPHVAPTHRCIAPDLIGMGKSDKPDLGYFFDDHVRFMDAFIEALGLEEVVLVIHDWGSALGFHWAKRNPERVKGIAFMEFIRPIPTWDEWPEFARETFQAFRTTDVGRELIIDQNVFIEGTLPMGVVRPLTEVEMDHYREPFRNPVDREPLWRFPNELPIAGEPANIVALVEEYMDWLHQSPVPKLLFWGTPGVLIPPAEAARLAKSLPNCKAVDIGPGLNLLQEDNPDLIGSEIARWLSTLEISGGSGGSGGGGSGGMVFTLEDFVGDWEQTAAYNLDQVLEQGGVSSLLQNLAVSVTPIQRIVRSGENALKIDIHVIIPYEGLSADQMAQIEEVFKVVYPVDDHHFKVILPYGTLVIDGVTPNMLNYFGRPYEGIAVFDGKKITVTGTLWNGNKIIDERLITPDGSMLFRVTINSGSGHHHHHH

SEQ ID NO: 3939 - protein, 457 aa, Synthetic construct
MFHYVDVGPRDGTPVLFLHGNPTSSYVWRNIIPHVAPTHRCIAPDLIGMGKSDKPDLGYFFDDHVRFMDAFIEALGLEEVVLVIHDWGSALGFHWAKRNPERVKGIAFMEFIRPIPTWDEWPEFARETFQAFRTTDVGRELIIDQNVFIEGTLPMGVVRPLTEVEMDHYREPFLNPDDREPLWRFPNELPIAGEPANIVALVEEYMDWLHQSPVPKLLFWGTPGVLIPPAEAARLAKSLPNCKAVDIGPGLNLLQEDNPDLIGSEIARWLSTLEISGGSGGSGGGGSGGMVFTLEDFVGDWEQTAAYNLDQVLEQGGVSSLLQNLAVSVTPIQRIVRSGENALKIDIHVIIPYEGLSADQMAQIEEVFKVVYPVDDHHFKVILPYGTLVIDGVTPNMLNYFGRPYEGIAVFDGKKITVTGTLWNGNKIIDERLITPDGSMLFRVTINSGSGHHHHHH

SEQ ID NO: 3940 - protein, 457 aa, Synthetic construct
MFHYVDVGPRDGTPVLFLHGNPTSSYVWRNIIPHVAPTHRCIAPDLIGMGKSDKPDLGYFFDDHVRFMDAFIEALGLEEVVLVIHDWGSALGFHWAKRNPERVKGIAFMEFIRPIPTWDEWPEFARETFQAFRTTDVGRELIIDQNVFIEGTLPMGVVRPLTEVEMDHYREPFLNPQDREPLWRFPNELPIAGEPANIVALVEEYMDWLHQSPVPKLLFWGTPGVLIPPAEAARLAKALPNCKAVDIGPGLNLLQEDNPDLIGSEIARWLSTLEISGGSGGSGGGGSGGMVFTLEDFVGDWEQTAAYNLDQVLEQGGVSSLLQNLAVSVTPIQRIVRSGENALKIDIHVIIPYEGLSADQMAQIEEVFKVVYPVDDHHFKVILPYGTLVIDGVTPNMLNYFGRPYEGIAVFDGKKITVTGTLWNGNKIIDERLITPDGSMLFRVTINSGSGHHHHHH

SEQ ID NO: 3941 - protein, 457 aa, Synthetic construct
MFHYVDVGPRDGTPVLFLHGNPTSSYVWRNIIPHVAPTHRCIAPDLIGMGKSDKPDLGYFFDDHVRFMDAFIEALGLEEVVLVIHDWGSALGFHWAKRNPERVKGIAFMEFIRPIPTWDEWPEFARETFQAFRTTDVGRELIIDQNVFIEGTLPMGVVRPLTEVEMDHYREPFLNPADREPLWRFPNELPIAGEPANIVALVEEYMDWLHQSPVPKLLFWGTPGVLIPPAEAARLAKSLPNCKAVDIGPGLNLLQEDNPDLIGSEIARWLSTLEISGGSGGSGGGGSGGMVFTLEDFVGDWEQTAAYNLDQVLEQGGVSSLLQNLAVSVTPIQRIVRSGENALKIDIHVIIPYEGLSADQMAQIEEVFKVVYPVDDHHFKVILPYGTLVIDGVTPNMLNYFGRPYEGIAVFDGKKITVTGTLWNGNKIIDERLITPDGSMLFRVTINSGSGHHHHHH

SEQ ID NO: 3942 - protein, 457 aa, Synthetic construct
MFHYVDVGPRDGTPVLFLHGNPTSSYVWRNIIPHVAPTHRCIAPDLIGMGKSDKPDLGYFFDDHVRFMDAFIEALGLEEVVLVIHDWGSALGFHWAKRNPERVKGIAFMEFIRPIPTWDEWPEFARETFQAFRTTDVGRELIIDQNVFIEGTLPMGVVRPLTEVEMDHYREPFLNPVDREPLYRFPNELPIAGEPANIVALVEEYMDWLHQSPVPKLLFWGTPGVLIPPAEAARLAKSLPNCKAVDIGPGLNLLQEDNPDLIGSEIARWLSTLEISGGSGGSGGGGSGGMVFTLEDFVGDWEQTAAYNLDQVLEQGGVSSLLQNLAVSVTPIQRIVRSGENALKIDIHVIIPYEGLSADQMAQIEEVFKVVYPVDDHHFKVILPYGTLVIDGVTPNMLNYFGRPYEGIAVFDGKKITVTGTLWNGNKIIDERLITPDGSMLFRVTINSGSGHHHHHH

SEQ ID NO: 3943 - protein, 457 aa, Synthetic construct
MFHYVDVGPRDGTPVLFLHGNPTSSYVWRNIIPHVAPTHRCIAPDLIGMGKSDKPDLGYFFDDHVRFMDAFIEALGLEEVVLVIHDWGSALGFHWAKRNPERVKGIAFMEFIRPIPTWDEWPEFARETFQAFRTTDVGRELIIDQNVFIEGTLPMGVVRPLTEVEMDHYREPFLNPVDREPLWRFPNELPIAGEPPNIVALVEEYMDWLHQSPVPKLLFWGTPGVLIPPAEAARLAKSLPNCKAVDIGPGLNLLQEDNPDLIGSEIARWLSTLEISGGSGGSGGGGSGGMVFTLEDFVGDWEQTAAYNLDQVLEQGGVSSLLQNLAVSVTPIQRIVRSGENALKIDIHVIIPYEGLSADQMAQIEEVFKVVYPVDDHHFKVILPYGTLVIDGVTPNMLNYFGRPYEGIAVFDGKKITVTGTLWNGNKIIDERLITPDGSMLFRVTINSGSGHHHHHH

SEQ ID NO: 3944 - protein, 457 aa, Synthetic construct
MFHYVDVGPRDGTPVLFLHGNPTSSYVWRNIIPHVAPTHRCIAPDLIGMGKSDKPDLGYFFDDHVRFMDAFIEALGLEEVVLVIHDWGSALGFHWAKRNPERVKGIAFMEFIRPIPTWDEWPEFARETFQAFRTTDVGRELIIDQNVFIEGTLPMGVVRPLTEVEMDHYREPFLNPVDREPLWRFPNELPIAGEPANIVAIVEEYMDWLHQSPVPKLLFWGTPGVLIPPAEAARLAKSLPNCKAVDIGPGLNLLQEDNPDLIGSEIARWLSTLEISGGSGGSGGGGSGGMVFTLEDFVGDWEQTAAYNLDQVLEQGGVSSLLQNLAVSVTPIQRIVRSGENALKIDIHVIIPYEGLSADQMAQIEEVFKVVYPVDDHHFKVILPYGTLVIDGVTPNMLNYFGRPYEGIAVFDGKKITVTGTLWNGNKIIDERLITPDGSMLFRVTINSGSGHHHHHH

SEQ ID NO: 3945 - protein, 457 aa, Synthetic construct
MFHYVDVGPRDGTPVLFLHGNPTSSYVWRNIIPHVAPTHRCIAPDLIGMGKSDKPDLGYFFDDHVRFMDAFIEALGLEEVVLVIHDWGSALGFHWAKRNPERVKGIAFMEFIRPIPTWDEWPEFARETFQAFRTTDVGRELIIDQNVFIEGTLPMGVVRPLTEVEMDHYREPFLNPVDREPLWRFPNELPIAGEPANIVALVDEYMDWLHQSPVPKLLFWGTPGVLIPPAEAARLAKSLPNCKAVDIGPGLNLLQEDNPDLIGSEIARWLSTLEISGGSGGSGGGGSGGMVFTLEDFVGDWEQTAAYNLDQVLEQGGVSSLLQNLAVSVTPIQRIVRSGENALKIDIHVIIPYEGLSADQMAQIEEVFKVVYPVDDHHFKVILPYGTLVIDGVTPNMLNYFGRPYEGIAVFDGKKITVTGTLWNGNKIIDERLITPDGSMLFRVTINSGSGHHHHHH

SEQ ID NO: 3946 - protein, 457 aa, Synthetic construct
MFHYVDVGPRDGTPVLFLHGNPTSSYVWRNIIPHVAPTHRCIAPDLIGMGKSDKPDLGYFFDDHVRFMDAFIEALGLEEVVLVIHDWGSALGFHWAKRNPERVKGIAFMEFIRPIPTWDEWPEFARETFQAFRTTDVGRELIIDQNVFIEGTLPMGVVRPLTEVEMDHYREPFLNPVDREPLWRFPNELPIAGEPANIVALVEEYMDWLHQSPVPKLLFWGTPGVLIPPAEAARLAKSLPNCTAVDIGPGLNLLQEDNPDLIGSEIARWLSTLEISGGSGGSGGGGSGGMVFTLEDFVGDWEQTAAYNLDQVLEQGGVSSLLQNLAVSVTPIQRIVRSGENALKIDIHVIIPYEGLSADQMAQIEEVFKVVYPVDDHHFKVILPYGTLVIDGVTPNMLNYFGRPYEGIAVFDGKKITVTGTLWNGNKIIDERLITPDGSMLFRVTINSGSGHHHHHH

SEQ ID NO: 3947 - protein, 457 aa, Synthetic construct
MFHYVDVGPRDGTPVLFLHGNPTSSYVWRNIIPHVAPTHRCIAPDLIGMGKSDKPDLGYFFDDHVRFMDAFIEALGLEEVVLVIHDWGSALGFHWAKRNPERVKGIAFMEFIRPIPTWDEWPEFARETFQAFRTTDVGRELIIDQNVFIEGTLPMGVVRPLTEVEMDHYREPFLNPVDREPLWRFPNELPIAGEPANIVALVEEYMDWLHQSPVPKLLFWGTPGVLIPPAEAARLAKSLPNCKAVDIGPGLNLLQEDNPDLIGAEIARWLSTLEISGGSGGSGGGGSGGMVFTLEDFVGDWEQTAAYNLDQVLEQGGVSSLLQNLAVSVTPIQRIVRSGENALKIDIHVIIPYEGLSADQMAQIEEVFKVVYPVDDHHFKVILPYGTLVIDGVTPNMLNYFGRPYEGIAVFDGKKITVTGTLWNGNKIIDERLITPDGSMLFRVTINSGSGHHHHHH

SEQ ID NO: 3948 - protein, 457 aa, Synthetic construct
MFHYVDVGPRDGTPVLFLHGNPTSSYVWRNIIPHVAPTHRCIAPDLIGMGKSDKPDLGYFFDDHVRFMDAFIEALGLEEVVLVIHDWGSALGFHWAQRNPERVKGIAFMEFIRPIPTWDEWPEFARETFQAFRTTDVGRELIIDQNVFIEGTLPMGVVRPLTEVEMDHYREPFLNPVDREPLWRFPNELPIAGEPANIVALVEEYMDWLHQSPVPKLLFWGTPGVLIPPAEAARLAKSLPNCKAVDIGPGLNLLQEDNPDLIGSEIARWLSTLEISGGSGGSGGGGSGGMVFTLEDFVGDWEQTAAYNLDQVLEQGGVSSLLQNLAVSVTPIQRIVRSGENALKIDIHVIIPYEGLSADQMAQIEEVFKVVYPVDDHHFKVILPYGTLVIDGVTPNMLNYFGRPYEGIAVFDGKKITVTGTLWNGNKIIDERLITPDGSMLFRVTINSGSGHHHHHH

SEQ ID NO: 3949 - protein, 457 aa, Synthetic construct
MFHYVDVGPRDGTPVLFLHGNPTSSYVWRNIIPHVAPTHRCIAPDLIGMGKSGKPDIGYFFDDHVRFMDAFIEALGLEEVVLVIHDWGSALGFHWAKRNPERVKGIAFMEFIRPIPTWDEWPEFARETFQAFRTTDVGRKLIIDQNVFIEGTLPMGVVRPLTEVEMDHYREPFLNPEDREPLWRFPNELPIAGEPANIVALVEEYMDWLHQSPVPKLLFWGTPGVLIPPAEAARLAKALPNCKAVDIGPGLNLLQEDNPDLIGSEIARWLSTLEISGGSGGSGGGGSGGMVFTLEDFVGDWEQTAAYNLDQVLEQGGVSSLLQNLAVSVTPIQRIVRSGENALKIDIHVIIPYEGLSADQMAQIEEVFKVVYPVDDHHFKVILPYGTLVIDGVTPNMLNYFGRPYEGIAVFDGKKITVTGTLWNGNKIIDERLITPDGSMLFRVTINSGSGHHHHHH

SEQ ID NO: 3950 - protein, 457 aa, Synthetic construct
MMHYVDVGPRDGTPVLFLHGNPTSSYVWRNIIPHVAPTHRCIAPDLIGMGKSDKPDLGYFFDDHVRFMDAFIEALGLEEVVLVIHDWGSALGFHWAKRNPERVKGIAFMEFIRPIPTWDEWPEFARETFQAFRTTDVGRKLIIDHNVFIEGTLRMGVVRPLTEVEMDHYREPFLNPVDREPLWRFPNELPIAGEPANIVALVEEYMDWLHQSPVPKLLFWGTPGVLIPPAEAARLAKSLPNCKAVDIGPGLNLLQEDNPDLIGSEIARWLSTLEISGGSGGSGGGGSGGMVFTLEDFVGDWEQTAAYNLDQVLEQGGVSSLLQNLAVSVTPIQRIVRSGENALKIDIHVIIPYEGLSADQMAQIEEVFKVVYPVDDHHFKVILPYGTLVIDGVTPNMLNYFGRPYEGIAVFDGKKITVTGTLWNGNKIIDERLITPDGSMLFRVTINSGSGHHHHHH

SEQ ID NO: 3951 - protein, 457 aa, Synthetic construct
MMHYVDVGPRDGTPVLFLHGNPTSSYVWRNIIPHVAPTHRCIAPDLIGMGKSDKPDLGYFFDDHVRFMDAFIEALGLEEVVLVIHDWGSALGFHWAKRNPERVKGIAFMEFIRPIPTWDEWPEFARETFQAFRTTDVGRELIIDHNVFIEGTLRMGVVRPLTEVEMDHYREPFLNPVDREPLWRFPNELPIAGEPANIVALVEEYMDWLHQSPVPKLLFWGTPGVLIPPAEAARLAKSLPNCKAVDIGPGLNLLQEDNPDLIGSEIARWLSTLEISGGSGGSGGGGSGGMVFTLEDFVGDWEQTAAYNLDQVLEQGGVSSLLQNLAVSVTPIQRIVRSGENALKIDIHVIIPYEGLSADQMAQIEEVFKVVYPVDDHHFKVILPYGTLVIDGVTPNMLNYFGRPYEGIAVFDGKKITVTGTLWNGNKIIDERLITPDGSMLFRVTINSGSGHHHHHH

SEQ ID NO: 3952 - protein, 457 aa, Synthetic construct
MMHYVDVGPRDGTPVLFLHGNPTSSYVWRNIIPHVAPTHRCIAPDLIGMGKSGKPDLGYFFDDHVRFMDAFIEALGLEEVVLVIHDWGSALGFHWAKRNPERVKGIAFMEFIRPIPTWDEWPEFARETFQAFRTTDVGRKLIIDHNVFIEGTLRMGVVRPLTEVEMDHYREPFLNPVDREPLWRFPNELPIAGEPANIVALVEEYMDWLHQSPVPKLLFWGTPGVLIPPAEAARLAKSLPNCKAVDIGPGLNLLQEDNPDLIGSEIARWLSTLEISGGSGGSGGGGSGGMVFTLEDFVGDWEQTAAYNLDQVLEQGGVSSLLQNLAVSVTPIQRIVRSGENALKIDIHVIIPYEGLSADQMAQIEEVFKVVYPVDDHHFKVILPYGTLVIDGVTPNMLNYFGRPYEGIAVFDGKKITVTGTLWNGNKIIDERLITPDGSMLFRVTINSGSGHHHHHH

SEQ ID NO: 3953 - protein, 457 aa, Synthetic construct
MMHYVDVGPRDGTPVLFLHGNPTSSYVWRNIIPHVAPTHRCIAPDLIGMGKSGKPDLGYFFDDHVRFMDAFIEALGLEEVVLVIHDWGSALGFHWAKRNPERVKGIAFMEFIRPIPTWDEWPEFARETFQAFRTTDVGRELIIDHNVFIEGTLRMGVVRPLTEVEMDHYREPFLNPVDREPLWRFPNELPIAGEPANIVALVEEYMDWLHQSPVPKLLFWGTPGVLIPPAEAARLAKSLPNCKAVDIGPGLNLLQEDNPDLIGSEIARWLSTLEISGGSGGSGGGGSGGMVFTLEDFVGDWEQTAAYNLDQVLEQGGVSSLLQNLAVSVTPIQRIVRSGENALKIDIHVIIPYEGLSADQMAQIEEVFKVVYPVDDHHFKVILPYGTLVIDGVTPNMLNYFGRPYEGIAVFDGKKITVTGTLWNGNKIIDERLITPDGSMLFRVTINSGSGHHHHHH

SEQ ID NO: 3954 - protein, 457 aa, Synthetic construct
MFHYVDEGPRDGTPVLFLHGNPTSSYVWRNIIPHVAPTHRCIAPDLIGMGKSGKPDLGYFFDDHVRFMDAFIEALGLEEVVLVIHDWGSALGFHWAKRNPERVKGIAFMEFIRPIPTWDEWPEFARETFQAFRTTDVGRELIIDQNVFIEGTLPMGVVRPLTEVEMDHYREPFLNPVDREPLWRFPNELPIAGEPANIVALVEEYMDWLHQSPVPKLLFWGTPGVLIPPAEAARLAKSLPNCKAVDIGPGLNLLQEDNPDLIGSEIARWLSTLEISGGSGGSGGGGSGGMVFTLEDFVGDWEQTAAYNLDQVLEQGGVSSLLQNLAVSVTPIQRIVRSGENALKIDIHVIIPYEGLSADQMAQIEEVFKVVYPVDDHHFKVILPYGTLVIDGVTPNMLNYFGRPYEGIAVFDGKKITVTGTLWNGNKIIDERLITPDGSMLFRVTINSGSGHHHHHH

SEQ ID NO: 3955 - protein, 457 aa, Synthetic construct
MFHYVDVGPRDGTPVLFLHGNPTSSYVWRNIIPHVAETHRCIAPDLIGMGKSGKPDLGYFFDDHVRFMDAFIEALGLEEVVLVIHDWGSALGFHWAKRNPERVKGIAFMEFIRPIPTWDEWPEFARETFQAFRTTDVGRELIIDQNVFIEGTLPMGVVRPLTEVEMDHYREPFLNPVDREPLWRFPNELPIAGEPANIVALVEEYMDWLHQSPVPKLLFWGTPGVLIPPAEAARLAKSLPNCKAVDIGPGLNLLQEDNPDLIGSEIARWLSTLEISGGSGGSGGGGSGGMVFTLEDFVGDWEQTAAYNLDQVLEQGGVSSLLQNLAVSVTPIQRIVRSGENALKIDIHVIIPYEGLSADQMAQIEEVFKVVYPVDDHHFKVILPYGTLVIDGVTPNMLNYFGRPYEGIAVFDGKKITVTGTLWNGNKIIDERLITPDGSMLFRVTINSGSGHHHHHH

SEQ ID NO: 3956 - protein, 457 aa, Synthetic construct
MFHYVDVGPRDGTPVLFLHGNPTSSYVWRNIIPHVAGTHRCIAPDLIGMGKSGKPDLGYFFDDHVRFMDAFIEALGLEEVVLVIHDWGSALGFHWAKRNPERVKGIAFMEFIRPIPTWDEWPEFARETFQAFRTTDVGRELIIDQNVFIEGTLPMGVVRPLTEVEMDHYREPFLNPVDREPLWRFPNELPIAGEPANIVALVEEYMDWLHQSPVPKLLFWGTPGVLIPPAEAARLAKSLPNCKAVDIGPGLNLLQEDNPDLIGSEIARWLSTLEISGGSGGSGGGGSGGMVFTLEDFVGDWEQTAAYNLDQVLEQGGVSSLLQNLAVSVTPIQRIVRSGENALKIDIHVIIPYEGLSADQMAQIEEVFKVVYPVDDHHFKVILPYGTLVIDGVTPNMLNYFGRPYEGIAVFDGKKITVTGTLWNGNKIIDERLITPDGSMLFRVTINSGSGHHHHHH

SEQ ID NO: 3957 - protein, 457 aa, Synthetic construct
MFHYVDVGPRDGTPVLFLHGNPTSSYVWRNIIPHVASTHRCIAPDLIGMGKSGKPDLGYFFDDHVRFMDAFIEALGLEEVVLVIHDWGSALGFHWAKRNPERVKGIAFMEFIRPIPTWDEWPEFARETFQAFRTTDVGRELIIDQNVFIEGTLPMGVVRPLTEVEMDHYREPFLNPVDREPLWRFPNELPIAGEPANIVALVEEYMDWLHQSPVPKLLFWGTPGVLIPPAEAARLAKSLPNCKAVDIGPGLNLLQEDNPDLIGSEIARWLSTLEISGGSGGSGGGGSGGMVFTLEDFVGDWEQTAAYNLDQVLEQGGVSSLLQNLAVSVTPIQRIVRSGENALKIDIHVIIPYEGLSADQMAQIEEVFKVVYPVDDHHFKVILPYGTLVIDGVTPNMLNYFGRPYEGIAVFDGKKITVTGTLWNGNKIIDERLITPDGSMLFRVTINSGSGHHHHHH

SEQ ID NO: 3958 - protein, 457 aa, Synthetic construct
MFHYVDVGPRDGTPVLFLHGNPTSSYVWRNIIPHVAPTHRCIAPDLIGMGKSGKPDLAYFFDDHVRFMDAFIEALGLEEVVLVIHDWGSALGFHWAKRNPERVKGIAFMEFIRPIPTWDEWPEFARETFQAFRTTDVGRELIIDQNVFIEGTLPMGVVRPLTEVEMDHYREPFLNPVDREPLWRFPNELPIAGEPANIVALVEEYMDWLHQSPVPKLLFWGTPGVLIPPAEAARLAKSLPNCKAVDIGPGLNLLQEDNPDLIGSEIARWLSTLEISGGSGGSGGGGSGGMVFTLEDFVGDWEQTAAYNLDQVLEQGGVSSLLQNLAVSVTPIQRIVRSGENALKIDIHVIIPYEGLSADQMAQIEEVFKVVYPVDDHHFKVILPYGTLVIDGVTPNMLNYFGRPYEGIAVFDGKKITVTGTLWNGNKIIDERLITPDGSMLFRVTINSGSGHHHHHH

SEQ ID NO: 3959 - protein, 457 aa, Synthetic construct
MFHYVDVGPRDGTPVLFLHGNPTSSYVWRNIIPHVAPTHRCIAPDLIGMGKSGKPDLPYFFDDHVRFMDAFIEALGLEEVVLVIHDWGSALGFHWAKRNPERVKGIAFMEFIRPIPTWDEWPEFARETFQAFRTTDVGRELIIDQNVFIEGTLPMGVVRPLTEVEMDHYREPFLNPVDREPLWRFPNELPIAGEPANIVALVEEYMDWLHQSPVPKLLFWGTPGVLIPPAEAARLAKSLPNCKAVDIGPGLNLLQEDNPDLIGSEIARWLSTLEISGGSGGSGGGGSGGMVFTLEDFVGDWEQTAAYNLDQVLEQGGVSSLLQNLAVSVTPIQRIVRSGENALKIDIHVIIPYEGLSADQMAQIEEVFKVVYPVDDHHFKVILPYGTLVIDGVTPNMLNYFGRPYEGIAVFDGKKITVTGTLWNGNKIIDERLITPDGSMLFRVTINSGSGHHHHHH

SEQ ID NO: 3960 - protein, 457 aa, Synthetic construct
MFHYVDVGPRDGTPVLFLHGNPTSSYVWRNIIPHVAPTHRCIAPDLIGMGKSGKPDLSYFFDDHVRFMDAFIEALGLEEVVLVIHDWGSALGFHWAKRNPERVKGIAFMEFIRPIPTWDEWPEFARETFQAFRTTDVGRELIIDQNVFIEGTLPMGVVRPLTEVEMDHYREPFLNPVDREPLWRFPNELPIAGEPANIVALVEEYMDWLHQSPVPKLLFWGTPGVLIPPAEAARLAKSLPNCKAVDIGPGLNLLQEDNPDLIGSEIARWLSTLEISGGSGGSGGGGSGGMVFTLEDFVGDWEQTAAYNLDQVLEQGGVSSLLQNLAVSVTPIQRIVRSGENALKIDIHVIIPYEGLSADQMAQIEEVFKVVYPVDDHHFKVILPYGTLVIDGVTPNMLNYFGRPYEGIAVFDGKKITVTGTLWNGNKIIDERLITPDGSMLFRVTINSGSGHHHHHH

SEQ ID NO: 3961 - protein, 457 aa, Synthetic construct
MFHYVDVGPRDGTPVLFLHGNPTSSYVWRNIIPHVAPTHRCIAPDLIGMGKSGKPDLDYFFDDHVRFMDAFIEALGLEEVVLVIHDWGSALGFHWAKRNPERVKGIAFMEFIRPIPTWDEWPEFARETFQAFRTTDVGRELIIDQNVFIEGTLPMGVVRPLTEVEMDHYREPFLNPVDREPLWRFPNELPIAGEPANIVALVEEYMDWLHQSPVPKLLFWGTPGVLIPPAEAARLAKSLPNCKAVDIGPGLNLLQEDNPDLIGSEIARWLSTLEISGGSGGSGGGGSGGMVFTLEDFVGDWEQTAAYNLDQVLEQGGVSSLLQNLAVSVTPIQRIVRSGENALKIDIHVIIPYEGLSADQMAQIEEVFKVVYPVDDHHFKVILPYGTLVIDGVTPNMLNYFGRPYEGIAVFDGKKITVTGTLWNGNKIIDERLITPDGSMLFRVTINSGSGHHHHHH

SEQ ID NO: 3962 - protein, 457 aa, Synthetic construct
MFHYVDVGPRDGTPVLFLHGNPTSSYVWRNIIPHVAPTHRCIAPDLIGMGKSGKPDLEYFFDDHVRFMDAFIEALGLEEVVLVIHDWGSALGFHWAKRNPERVKGIAFMEFIRPIPTWDEWPEFARETFQAFRTTDVGRELIIDQNVFIEGTLPMGVVRPLTEVEMDHYREPFLNPVDREPLWRFPNELPIAGEPANIVALVEEYMDWLHQSPVPKLLFWGTPGVLIPPAEAARLAKSLPNCKAVDIGPGLNLLQEDNPDLIGSEIARWLSTLEISGGSGGSGGGGSGGMVFTLEDFVGDWEQTAAYNLDQVLEQGGVSSLLQNLAVSVTPIQRIVRSGENALKIDIHVIIPYEGLSADQMAQIEEVFKVVYPVDDHHFKVILPYGTLVIDGVTPNMLNYFGRPYEGIAVFDGKKITVTGTLWNGNKIIDERLITPDGSMLFRVTINSGSGHHHHHH

SEQ ID NO: 3963 - protein, 457 aa, Synthetic construct
MFHYVDVGPRDGTPVLFLHGNPTSSYVWRNIIPHVAPTHRCIAPDLIGMGKSGKPDLGYFFDDHVRFVDAFIEALGLEEVVLVIHDWGSALGFHWAKRNPERVKGIAFMEFIRPIPTWDEWPEFARETFQAFRTTDVGRELIIDQNVFIEGTLPMGVVRPLTEVEMDHYREPFLNPVDREPLWRFPNELPIAGEPANIVALVEEYMDWLHQSPVPKLLFWGTPGVLIPPAEAARLAKSLPNCKAVDIGPGLNLLQEDNPDLIGSEIARWLSTLEISGGSGGSGGGGSGGMVFTLEDFVGDWEQTAAYNLDQVLEQGGVSSLLQNLAVSVTPIQRIVRSGENALKIDIHVIIPYEGLSADQMAQIEEVFKVVYPVDDHHFKVILPYGTLVIDGVTPNMLNYFGRPYEGIAVFDGKKITVTGTLWNGNKIIDERLITPDGSMLFRVTINSGSGHHHHHH

SEQ ID NO: 3964 - protein, 457 aa, Synthetic construct
MFHYVDVGPRDGTPVLFLHGNPTSSYVWRNIIPHVAPTHRCIAPDLIGMGKSGKPDLGYFFDDHVRFMDAFIQALGLEEVVLVIHDWGSALGFHWAKRNPERVKGIAFMEFIRPIPTWDEWPEFARETFQAFRTTDVGRELIIDQNVFIEGTLPMGVVRPLTEVEMDHYREPFLNPVDREPLWRFPNELPIAGEPANIVALVEEYMDWLHQSPVPKLLFWGTPGVLIPPAEAARLAKSLPNCKAVDIGPGLNLLQEDNPDLIGSEIARWLSTLEISGGSGGSGGGGSGGMVFTLEDFVGDWEQTAAYNLDQVLEQGGVSSLLQNLAVSVTPIQRIVRSGENALKIDIHVIIPYEGLSADQMAQIEEVFKVVYPVDDHHFKVILPYGTLVIDGVTPNMLNYFGRPYEGIAVFDGKKITVTGTLWNGNKIIDERLITPDGSMLFRVTINSGSGHHHHHH

SEQ ID NO: 3965 - protein, 457 aa, Synthetic construct
MFHYVDVGPRDGTPVLFLHGNPTSSYVWRNIIPHVAPTHRCIAPDLIGMGKSGKPDLGYFFDDHVRFMDAFIEALGLENVVLVIHDWGSALGFHWAKRNPERVKGIAFMEFIRPIPTWDEWPEFARETFQAFRTTDVGRELIIDQNVFIEGTLPMGVVRPLTEVEMDHYREPFLNPVDREPLWRFPNELPIAGEPANIVALVEEYMDWLHQSPVPKLLFWGTPGVLIPPAEAARLAKSLPNCKAVDIGPGLNLLQEDNPDLIGSEIARWLSTLEISGGSGGSGGGGSGGMVFTLEDFVGDWEQTAAYNLDQVLEQGGVSSLLQNLAVSVTPIQRIVRSGENALKIDIHVIIPYEGLSADQMAQIEEVFKVVYPVDDHHFKVILPYGTLVIDGVTPNMLNYFGRPYEGIAVFDGKKITVTGTLWNGNKIIDERLITPDGSMLFRVTINSGSGHHHHHH

SEQ ID NO: 3966 - protein, 457 aa, Synthetic construct
MFHYVDVGPRDGTPVLFLHGNPTSSYVWRNIIPHVAPTHRCIAPDLIGMGKSGKPDLGYFFDDHVRFMDAFIEALGLEDVVLVIHDWGSALGFHWAKRNPERVKGIAFMEFIRPIPTWDEWPEFARETFQAFRTTDVGRELIIDQNVFIEGTLPMGVVRPLTEVEMDHYREPFLNPVDREPLWRFPNELPIAGEPANIVALVEEYMDWLHQSPVPKLLFWGTPGVLIPPAEAARLAKSLPNCKAVDIGPGLNLLQEDNPDLIGSEIARWLSTLEISGGSGGSGGGGSGGMVFTLEDFVGDWEQTAAYNLDQVLEQGGVSSLLQNLAVSVTPIQRIVRSGENALKIDIHVIIPYEGLSADQMAQIEEVFKVVYPVDDHHFKVILPYGTLVIDGVTPNMLNYFGRPYEGIAVFDGKKITVTGTLWNGNKIIDERLITPDGSMLFRVTINSGSGHHHHHH

SEQ ID NO: 3967 - protein, 457 aa, Synthetic construct; identical to SEQ ID NO: 3933

SEQ ID NO: 3968 - protein, 457 aa, Synthetic construct
MFHYVDVGPRDGTPVLFLHGNPTSSYVWRNIIPHVAPTHRCIAPDLIGMGKSGKPDLGYFFDDHVRFMDAFIEALGLEEVVLVIHDWGSALGFHWARRNPERVKGIAFMEFIRPIPTWDEWPEFARETFQAFRTTDVGRELIIDQNVFIEGTLPMGVVRPLTEVEMDHYREPFLNPVDREPLWRFPNELPIAGEPANIVALVEEYMDWLHQSPVPKLLFWGTPGVLIPPAEAARLAKSLPNCKAVDIGPGLNLLQEDNPDLIGSEIARWLSTLEISGGSGGSGGGGSGGMVFTLEDFVGDWEQTAAYNLDQVLEQGGVSSLLQNLAVSVTPIQRIVRSGENALKIDIHVIIPYEGLSADQMAQIEEVFKVVYPVDDHHFKVILPYGTLVIDGVTPNMLNYFGRPYEGIAVFDGKKITVTGTLWNGNKIIDERLITPDGSMLFRVTINSGSGHHHHHH

SEQ ID NO: 3969 - protein, 457 aa, Synthetic construct
MFHYVDVGPRDGTPVLFLHGNPTSSYVWRNIIPHVAPTHRCIAPDLIGMGKSGKPDLGYFFDDHVRFMDAFIEALGLEEVVLVIHDWGSALGFHWAKRNPERVVGIAFMEFIRPIPTWDEWPEFARETFQAFRTTDVGRELIIDQNVFIEGTLPMGVVRPLTEVEMDHYREPFLNPVDREPLWRFPNELPIAGEPANIVALVEEYMDWLHQSPVPKLLFWGTPGVLIPPAEAARLAKSLPNCKAVDIGPGLNLLQEDNPDLIGSEIARWLSTLEISGGSGGSGGGGSGGMVFTLEDFVGDWEQTAAYNLDQVLEQGGVSSLLQNLAVSVTPIQRIVRSGENALKIDIHVIIPYEGLSADQMAQIEEVFKVVYPVDDHHFKVILPYGTLVIDGVTPNMLNYFGRPYEGIAVFDGKKITVTGTLWNGNKIIDERLITPDGSMLFRVTINSGSGHHHHHH

SEQ ID NO: 3970 - protein, 457 aa, Synthetic construct
MFHYVDVGPRDGTPVLFLHGNPTSSYVWRNIIPHVAPTHRCIAPDLIGMGKSGKPDLGYFFDDHVRFMDAFIEALGLEEVVLVIHDWGSALGFHWAKRNPERVKGIAFMEFIRPISTWDEWPEFARETFQAFRTTDVGRELIIDQNVFIEGTLPMGVVRPLTEVEMDHYREPFLNPVDREPLWRFPNELPIAGEPANIVALVEEYMDWLHQSPVPKLLFWGTPGVLIPPAEAARLAKSLPNCKAVDIGPGLNLLQEDNPDLIGSEIARWLSTLEISGGSGGSGGGGSGGMVFTLEDFVGDWEQTAAYNLDQVLEQGGVSSLLQNLAVSVTPIQRIVRSGENALKIDIHVIIPYEGLSADQMAQIEEVFKVVYPVDDHHFKVILPYGTLVIDGVTPNMLNYFGRPYEGIAVFDGKKITVTGTLWNGNKIIDERLITPDGSMLFRVTINSGSGHHHHHH

SEQ ID NO: 3971 - protein, 457 aa, Synthetic construct
MFHYVDVGPRDGTPVLFLHGNPTSSYVWRNIIPHVAPTHRCIAPDLIGMGKSGKPDLGYFFDDHVRFMDAFIEALGLEEVVLVIHDWGSALGFHWAKRNPERVKGIAFMEFIRPIATWDEWPEFARETFQAFRTTDVGRELIIDQNVFIEGTLPMGVVRPLTEVEMDHYREPFLNPVDREPLWRFPNELPIAGEPANIVALVEEYMDWLHQSPVPKLLFWGTPGVLIPPAEAARLAKSLPNCKAVDIGPGLNLLQEDNPDLIGSEIARWLSTLEISGGSGGSGGGGSGGMVFTLEDFVGDWEQTAAYNLDQVLEQGGVSSLLQNLAVSVTPIQRIVRSGENALKIDIHVIIPYEGLSADQMAQIEEVFKVVYPVDDHHFKVILPYGTLVIDGVTPNMLNYFGRPYEGIAVFDGKKITVTGTLWNGNKIIDERLITPDGSMLFRVTINSGSGHHHHHH

SEQ ID NO: 3972 - protein, 457 aa, Synthetic construct
MFHYVDVGPRDGTPVLFLHGNPTSSYVWRNIIPHVAPTHRCIAPDLIGMGKSGKPDLGYFFDDHVRFMDAFIEALGLEEVVLVIHDWGSALGFHWAKRNPERVKGIAFMEFIRPIGTWDEWPEFARETFQAFRTTDVGRELIIDQNVFIEGTLPMGVVRPLTEVEMDHYREPFLNPVDREPLWRFPNELPIAGEPANIVALVEEYMDWLHQSPVPKLLFWGTPGVLIPPAEAARLAKSLPNCKAVDIGPGLNLLQEDNPDLIGSEIARWLSTLEISGGSGGSGGGGSGGMVFTLEDFVGDWEQTAAYNLDQVLEQGGVSSLLQNLAVSVTPIQRIVRSGENALKIDIHVIIPYEGLSADQMAQIEEVFKVVYPVDDHHFKVILPYGTLVIDGVTPNMLNYFGRPYEGIAVFDGKKITVTGTLWNGNKIIDERLITPDGSMLFRVTINSGSGHHHHHH

SEQ ID NO: 3973 - protein, 457 aa, Synthetic construct
MFHYVDVGPRDGTPVLFLHGNPTSSYVWRNIIPHVAPTHRCIAPDLIGMGKSGKPDLGYFFDDHVRFMDAFIEALGLEEVVLVIHDWGSALGFHWAKRNPERVKGIAFMEFIRPIPDWDEWPEFARETFQAFRTTDVGRELIIDQNVFIEGTLPMGVVRPLTEVEMDHYREPFLNPVDREPLWRFPNELPIAGEPANIVALVEEYMDWLHQSPVPKLLFWGTPGVLIPPAEAARLAKSLPNCKAVDIGPGLNLLQEDNPDLIGSEIARWLSTLEISGGSGGSGGGGSGGMVFTLEDFVGDWEQTAAYNLDQVLEQGGVSSLLQNLAVSVTPIQRIVRSGENALKIDIHVIIPYEGLSADQMAQIEEVFKVVYPVDDHHFKVILPYGTLVIDGVTPNMLNYFGRPYEGIAVFDGKKITVTGTLWNGNKIIDERLITPDGSMLFRVTINSGSGHHHHHH

SEQ ID NO: 3974 - protein, 457 aa, Synthetic construct
MFHYVDVGPRDGTPVLFLHGNPTSSYVWRNIIPHVAPTHRCIAPDLIGMGKSGKPDLGYFFDDHVRFMDAFIEALGLEEVVLVIHDWGSALGFHWAKRNPERVKGIAFMEFIRPIPSWDEWPEFARETFQAFRTTDVGRELIIDQNVFIEGTLPMGVVRPLTEVEMDHYREPFLNPVDREPLWRFPNELPIAGEPANIVALVEEYMDWLHQSPVPKLLFWGTPGVLIPPAEAARLAKSLPNCKAVDIGPGLNLLQEDNPDLIGSEIARWLSTLEISGGSGGSGGGGSGGMVFTLEDFVGDWEQTAAYNLDQVLEQGGVSSLLQNLAVSVTPIQRIVRSGENALKIDIHVIIPYEGLSADQMAQIEEVFKVVYPVDDHHFKVILPYGTLVIDGVTPNMLNYFGRPYEGIAVFDGKKITVTGTLWNGNKIIDERLITPDGSMLFRVTINSGSGHHHHHH

SEQ ID NO: 3975 - protein, 457 aa, Synthetic construct
MFHYVDVGPRDGTPVLFLHGNPTSSYVWRNIIPHVAPTHRCIAPDLIGMGKSGKPDLGYFFDDHVRFMDAFIEALGLEEVVLVIHDWGSALGFHWAKRNPERVKGIAFMEFIRPIPTWDEWPAFARETFQAFRTTDVGRELIIDQNVFIEGTLPMGVVRPLTEVEMDHYREPFLNPVDREPLWRFPNELPIAGEPANIVALVEEYMDWLHQSPVPKLLFWGTPGVLIPPAEAARLAKSLPNCKAVDIGPGLNLLQEDNPDLIGSEIARWLSTLEISGGSGGSGGGGSGGMVFTLEDFVGDWEQTAAYNLDQVLEQGGVSSLLQNLAVSVTPIQRIVRSGENALKIDIHVIIPYEGLSADQMAQIEEVFKVVYPVDDHHFKVILPYGTLVIDGVTPNMLNYFGRPYEGIAVFDGKKITVTGTLWNGNKIIDERLITPDGSMLFRVTINSGSGHHHHHH

SEQ ID NO: 3976 - protein, 457 aa, Synthetic construct
MFHYVDVGPRDGTPVLFLHGNPTSSYVWRNIIPHVAPTHRCIAPDLIGMGKSGKPDLGYFFDDHVRFMDAFIEALGLEEVVLVIHDWGSALGFHWAKRNPERVKGIAFMEFIRPIPTWDEWPEFARSTFQAFRTTDVGRELIIDQNVFIEGTLPMGVVRPLTEVEMDHYREPFLNPVDREPLWRFPNELPIAGEPANIVALVEEYMDWLHQSPVPKLLFWGTPGVLIPPAEAARLAKSLPNCKAVDIGPGLNLLQEDNPDLIGSEIARWLSTLEISGGSGGSGGGGSGGMVFTLEDFVGDWEQTAAYNLDQVLEQGGVSSLLQNLAVSVTPIQRIVRSGENALKIDIHVIIPYEGLSADQMAQIEEVFKVVYPVDDHHFKVILPYGTLVIDGVTPNMLNYFGRPYEGIAVFDGKKITVTGTLWNGNKIIDERLITPDGSMLFRVTINSGSGHHHHHH

SEQ ID NO: 3977 - protein, 457 aa, Synthetic construct
MFHYVDVGPRDGTPVLFLHGNPTSSYVWRNIIPHVAPTHRCIAPDLIGMGKSGKPDLGYFFDDHVRFMDAFIEALGLEEVVLVIHDWGSALGFHWAKRNPERVKGIAFMEFIRPIPTWDEWPEFARKTFQAFRTTDVGRELIIDQNVFIEGTLPMGVVRPLTEVEMDHYREPFLNPVDREPLWRFPNELPIAGEPANIVALVEEYMDWLHQSPVPKLLFWGTPGVLIPPAEAARLAKSLPNCKAVDIGPGLNLLQEDNPDLIGSEIARWLSTLEISGGSGGSGGGGSGGMVFTLEDFVGDWEQTAAYNLDQVLEQGGVSSLLQNLAVSVTPIQRIVRSGENALKIDIHVIIPYEGLSADQMAQIEEVFKVVYPVDDHHFKVILPYGTLVIDGVTPNMLNYFGRPYEGIAVFDGKKITVTGTLWNGNKIIDERLITPDGSMLFRVTINSGSGHHHHHH

SEQ ID NO: 3978 - protein, 457 aa, Synthetic construct
MFHYVDVGPRDGTPVLFLHGNPTSSYVWRNIIPHVAPTHRCIAPDLIGMGKSGKPDLGYFFDDHVRFMDAFIEALGLEEVVLVIHDWGSALGFHWAKRNPERVKGIAFMEFIRPIPTWDEWPEFARQTFQAFRTTDVGRELIIDQNVFIEGTLPMGVVRPLTEVEMDHYREPFLNPVDREPLWRFPNELPIAGEPANIVALVEEYMDWLHQSPVPKLLFWGTPGVLIPPAEAARLAKSLPNCKAVDIGPGLNLLQEDNPDLIGSEIARWLSTLEISGGSGGSGGGGSGGMVFTLEDFVGDWEQTAAYNLDQVLEQGGVSSLLQNLAVSVTPIQRIVRSGENALKIDIHVIIPYEGLSADQMAQIEEVFKVVYPVDDHHFKVILPYGTLVIDGVTPNMLNYFGRPYEGIAVFDGKKITVTGTLWNGNKIIDERLITPDGSMLFRVTINSGSGHHHHHH

SEQ ID NO: 3979 - protein, 457 aa, Synthetic construct
MFHYVDVGPRDGTPVLFLHGNPTSSYVWRNIIPHVAPTHRCIAPDLIGMGKSGKPDLGYFFDDHVRFMDAFIEALGLEEVVLVIHDWGSALGFHWAKRNPERVKGIAFMEFIRPIPTWDEWPEFARETFQRFRTTDVGRELIIDQNVFIEGTLPMGVVRPLTEVEMDHYREPFLNPVDREPLWRFPNELPIAGEPANIVALVEEYMDWLHQSPVPKLLFWGTPGVLIPPAEAARLAKSLPNCKAVDIGPGLNLLQEDNPDLIGSEIARWLSTLEISGGSGGSGGGGSGGMVFTLEDFVGDWEQTAAYNLDQVLEQGGVSSLLQNLAVSVTPIQRIVRSGENALKIDIHVIIPYEGLSADQMAQIEEVFKVVYPVDDHHFKVILPYGTLVIDGVTPNMLNYFGRPYEGIAVFDGKKITVTGTLWNGNKIIDERLITPDGSMLFRVTINSGSGHHHHHH

SEQ ID NO: 3980 - protein, 457 aa, Synthetic construct
MFHYVDVGPRDGTPVLFLHGNPTSSYVWRNIIPHVAPTHRCIAPDLIGMGKSGKPDLGYFFDDHVRFMDAFIEALGLEEVVLVIHDWGSALGFHWAKRNPERVKGIAFMEFIRPIPTWDEWPEFARETFQSFRTTDVGRELIIDQNVFIEGTLPMGVVRPLTEVEMDHYREPFLNPVDREPLWRFPNELPIAGEPANIVALVEEYMDWLHQSPVPKLLFWGTPGVLIPPAEAARLAKSLPNCKAVDIGPGLNLLQEDNPDLIGSEIARWLSTLEISGGSGGSGGGGSGGMVFTLEDFVGDWEQTAAYNLDQVLEQGGVSSLLQNLAVSVTPIQRIVRSGENALKIDIHVIIPYEGLSADQMAQIEEVFKVVYPVDDHHFKVILPYGTLVIDGVTPNMLNYFGRPYEGIAVFDGKKITVTGTLWNGNKIIDERLITPDGSMLFRVTINSGSGHHHHHH

SEQ ID NO: 3981 - protein, 457 aa, Synthetic construct
MFHYVDVGPRDGTPVLFLHGNPTSSYVWRNIIPHVAPTHRCIAPDLIGMGKSGKPDLGYFFDDHVRFMDAFIEALGLEEVVLVIHDWGSALGFHWAKRNPERVKGIAFMEFIRPIPTWDEWPEFARETFQAFRTTDVGRSLIIDQNVFIEGTLPMGVVRPLTEVEMDHYREPFLNPVDREPLWRFPNELPIAGEPANIVALVEEYMDWLHQSPVPKLLFWGTPGVLIPPAEAARLAKSLPNCKAVDIGPGLNLLQEDNPDLIGSEIARWLSTLEISGGSGGSGGGGSGGMVFTLEDFVGDWEQTAAYNLDQVLEQGGVSSLLQNLAVSVTPIQRIVRSGENALKIDIHVIIPYEGLSADQMAQIEEVFKVVYPVDDHHFKVILPYGTLVIDGVTPNMLNYFGRPYEGIAVFDGKKITVTGTLWNGNKIIDERLITPDGSMLFRVTINSGSGHHHHHH

SEQ ID NO: 3982 - protein, 457 aa, Synthetic construct
MFHYVDVGPRDGTPVLFLHGNPTSSYVWRNIIPHVAPTHRCIAPDLIGMGKSGKPDLGYFFDDHVRFMDAFIEALGLEEVVLVIHDWGSALGFHWAKRNPERVKGIAFMEFIRPIPTWDEWPEFARETFQAFRTTDVGRELIIDQNVFIEGTLPMGVVRPLTDVEMDHYREPFLNPVDREPLWRFPNELPIAGEPANIVALVEEYMDWLHQSPVPKLLFWGTPGVLIPPAEAARLAKSLPNCKAVDIGPGLNLLQEDNPDLIGSEIARWLSTLEISGGSGGSGGGGSGGMVFTLEDFVGDWEQTAAYNLDQVLEQGGVSSLLQNLAVSVTPIQRIVRSGENALKIDIHVIIPYEGLSADQMAQIEEVFKVVYPVDDHHFKVILPYGTLVIDGVTPNMLNYFGRPYEGIAVFDGKKITVTGTLWNGNKIIDERLITPDGSMLFRVTINSGSGHHHHHH

SEQ ID NO: 3983 - protein, 457 aa, Synthetic construct
MFHYVDVGPRDGTPVLFLHGNPTSSYVWRNIIPHVAPTHRCIAPDLIGMGKSGKPDLGYFFDDHVRFMDAFIEALGLEEVVLVIHDWGSALGFHWAKRNPERVKGIAFMEFIRPIPTWDEWPEFARETFQAFRTTDVGRELIIDQNVFIEGTLPMGVVRPLTEVEMAHYREPFLNPVDREPLWRFPNELPIAGEPANIVALVEEYMDWLHQSPVPKLLFWGTPGVLIPPAEAARLAKSLPNCKAVDIGPGLNLLQEDNPDLIGSEIARWLSTLEISGGSGGSGGGGSGGMVFTLEDFVGDWEQTAAYNLDQVLEQGGVSSLLQNLAVSVTPIQRIVRSGENALKIDIHVIIPYEGLSADQMAQIEEVFKVVYPVDDHHFKVILPYGTLVIDGVTPNMLNYFGRPYEGIAVFDGKKITVTGTLWNGNKIIDERLITPDGSMLFRVTINSGSGHHHHHH

SEQ ID NO: 3984 - protein, 457 aa, Synthetic construct
MFHYVDVGPRDGTPVLFLHGNPTSSYVWRNIIPHVAPTHRCIAPDLIGMGKSGKPDLGYFFDDHVRFMDAFIEALGLEEVVLVIHDWGSALGFHWAKRNPERVKGIAFMEFIRPIPTWDEWPEFARETFQAFRTTDVGRELIIDQNVFIEGTLPMGVVRPLTEVEMQHYREPFLNPVDREPLWRFPNELPIAGEPANIVALVEEYMDWLHQSPVPKLLFWGTPGVLIPPAEAARLAKSLPNCKAVDIGPGLNLLQEDNPDLIGSEIARWLSTLEISGGSGGSGGGGSGGMVFTLEDFVGDWEQTAAYNLDQVLEQGGVSSLLQNLAVSVTPIQRIVRSGENALKIDIHVIIPYEGLSADQMAQIEEVFKVVYPVDDHHFKVILPYGTLVIDGVTPNMLNYFGRPYEGIAVFDGKKITVTGTLWNGNKIIDERLITPDGSMLFRVTINSGSGHHHHHH

SEQ ID NO: 3985 - protein, 457 aa, Synthetic construct
MFHYVDVGPRDGTPVLFLHGNPTSSYVWRNIIPHVAPTHRCIAPDLIGMGKSGKPDLGYFFDDHVRFMDAFIEALGLEEVVLVIHDWGSALGFHWAKRNPERVKGIAFMEFIRPIPTWDEWPEFARETFQAFRTTDVGRELIIDQNVFIEGTLPMGVVRPLTEVEMDHYREPFRNPVDREPLWRFPNELPIAGEPANIVALVEEYMDWLHQSPVPKLLFWGTPGVLIPPAEAARLAKSLPNCKAVDIGPGLNLLQEDNPDLIGSEIARWLSTLEISGGSGGSGGGGSGGMVFTLEDFVGDWEQTAAYNLDQVLEQGGVSSLLQNLAVSVTPIQRIVRSGENALKIDIHVIIPYEGLSADQMAQIEEVFKVVYPVDDHHFKVILPYGTLVIDGVTPNMLNYFGRPYEGIAVFDGKKITVTGTLWNGNKIIDERLITPDGSMLFRVTINSGSGHHHHHH

SEQ ID NO: 3986 - protein, 457 aa, Synthetic construct
MFHYVDVGPRDGTPVLFLHGNPTSSYVWRNIIPHVAPTHRCIAPDLIGMGKSGKPDLGYFFDDHVRFMDAFIEALGLEEVVLVIHDWGSALGFHWAKRNPERVKGIAFMEFIRPIPTWDEWPEFARETFQAFRTTDVGRELIIDQNVFIEGTLPMGVVRPLTEVEMDHYREPFLSPVDREPLWRFPNELPIAGEPANIVALVEEYMDWLHQSPVPKLLFWGTPGVLIPPAEAARLAKSLPNCKAVDIGPGLNLLQEDNPDLIGSEIARWLSTLEISGGSGGSGGGGSGGMVFTLEDFVGDWEQTAAYNLDQVLEQGGVSSLLQNLAVSVTPIQRIVRSGENALKIDIHVIIPYEGLSADQMAQIEEVFKVVYPVDDHHFKVILPYGTLVIDGVTPNMLNYFGRPYEGIAVFDGKKITVTGTLWNGNKIIDERLITPDGSMLFRVTINSGSGHHHHHH

SEQ ID NO: 3987 - protein, 457 aa, Synthetic construct
MFHYVDVGPRDGTPVLFLHGNPTSSYVWRNIIPHVAPTHRCIAPDLIGMGKSGKPDLGYFFDDHVRFMDAFIEALGLEEVVLVIHDWGSALGFHWAKRNPERVKGIAFMEFIRPIPTWDEWPEFARETFQAFRTTDVGRELIIDQNVFIEGTLPMGVVRPLTEVEMDHYREPFLNPVDREPLWRFPNELPIDGEPANIVALVEEYMDWLHQSPVPKLLFWGTPGVLIPPAEAARLAKSLPNCKAVDIGPGLNLLQEDNPDLIGSEIARWLSTLEISGGSGGSGGGGSGGMVFTLEDFVGDWEQTAAYNLDQVLEQGGVSSLLQNLAVSVTPIQRIVRSGENALKIDIHVIIPYEGLSADQMAQIEEVFKVVYPVDDHHFKVILPYGTLVIDGVTPNMLNYFGRPYEGIAVFDGKKITVTGTLWNGNKIIDERLITPDGSMLFRVTINSGSGHHHHHH

SEQ ID NO: 3988 - protein, 457 aa, Synthetic construct
MFHYVDVGPRDGTPVLFLHGNPTSSYVWRNIIPHVAPTHRCIAPDLIGMGKSGKPDLGYFFDDHVRFMDAFIEALGLEEVVLVIHDWGSALGFHWAKRNPERVKGIAFMEFIRPIPTWDEWPEFARETFQAFRTTDVGRELIIDQNVFIEGTLPMGVVRPLTEVEMDHYREPFLNPVDREPLWRFPNELPIGGEPANIVALVEEYMDWLHQSPVPKLLFWGTPGVLIPPAEAARLAKSLPNCKAVDIGPGLNLLQEDNPDLIGSEIARWLSTLEISGGSGGSGGGGSGGMVFTLEDFVGDWEQTAAYNLDQVLEQGGVSSLLQNLAVSVTPIQRIVRSGENALKIDIHVIIPYEGLSADQMAQIEEVFKVVYPVDDHHFKVILPYGTLVIDGVTPNMLNYFGRPYEGIAVFDGKKITVTGTLWNGNKIIDERLITPDGSMLFRVTINSGSGHHHHHH

SEQ ID NO: 3989 - protein, 457 aa, Synthetic construct; identical to SEQ ID NO: 3909

SEQ ID NO: 3990 - protein, 457 aa, Synthetic construct
MFHYVDVGPRDGTPVLFLHGNPTSSYVWRNIIPHVAPTHRCIAPDLIGMGKSGKPDLGYFFDDHVRFMDAFIEALGLEEVVLVIHDWGSALGFHWAKRNPERVKGIAFMEFIRPIPTWDEWPEFARETFQAFRTTDVGRELIIDQNVFIEGTLPMGVVRPLTEVEMDHYREPFLNPVDREPLWRFPNELPIAGEPANIVALVDEYMDWLHQSPVPKLLFWGTPGVLIPPAEAARLAKSLPNCKAVDIGPGLNLLQEDNPDLIGSEIARWLSTLEISGGSGGSGGGGSGGMVFTLEDFVGDWEQTAAYNLDQVLEQGGVSSLLQNLAVSVTPIQRIVRSGENALKIDIHVIIPYEGLSADQMAQIEEVFKVVYPVDDHHFKVILPYGTLVIDGVTPNMLNYFGRPYEGIAVFDGKKITVTGTLWNGNKIIDERLITPDGSMLFRVTINSGSGHHHHHH

SEQ ID NO: 3991 - protein, 457 aa, Synthetic construct
MFHYVDVGPRDGTPVLFLHGNPTSSYVWRNIIPHVAPTHRCIAPDLIGMGKSGKPDLGYFFDDHVRFMDAFIEALGLEEVVLVIHDWGSALGFHWAKRNPERVKGIAFMEFIRPIPTWDEWPEFARETFQAFRTTDVGRELIIDQNVFIEGTLPMGVVRPLTEVEMDHYREPFLNPVDREPLWRFPNELPIAGEPANIVALVQEYMDWLHQSPVPKLLFWGTPGVLIPPAEAARLAKSLPNCKAVDIGPGLNLLQEDNPDLIGSEIARWLSTLEISGGSGGSGGGGSGGMVFTLEDFVGDWEQTAAYNLDQVLEQGGVSSLLQNLAVSVTPIQRIVRSGENALKIDIHVIIPYEGLSADQMAQIEEVFKVVYPVDDHHFKVILPYGTLVIDGVTPNMLNYFGRPYEGIAVFDGKKITVTGTLWNGNKIIDERLITPDGSMLFRVTINSGSGHHHHHH

SEQ ID NO: 3992 - protein, 457 aa, Synthetic construct
MFHYVDVGPRDGTPVLFLHGNPTSSYVWRNIIPHVAPTHRCIAPDLIGMGKSGKPDLGYFFDDHVRFMDAFIEALGLEEVVLVIHDWGSALGFHWAKRNPERVKGIAFMEFIRPIPTWDEWPEFARETFQAFRTTDVGRELIIDQNVFIEGTLPMGVVRPLTEVEMDHYREPFLNPVDREPLWRFPNELPIAGEPANIVALVNEYMDWLHQSPVPKLLFWGTPGVLIPPAEAARLAKSLPNCKAVDIGPGLNLLQEDNPDLIGSEIARWLSTLEISGGSGGSGGGGSGGMVFTLEDFVGDWEQTAAYNLDQVLEQGGVSSLLQNLAVSVTPIQRIVRSGENALKIDIHVIIPYEGLSADQMAQIEEVFKVVYPVDDHHFKVILPYGTLVIDGVTPNMLNYFGRPYEGIAVFDGKKITVTGTLWNGNKIIDERLITPDGSMLFRVTINSGSGHHHHHH

SEQ ID NO: 3993 - protein, 457 aa, Synthetic construct
MFHYVDVGPRDGTPVLFLHGNPTSSYVWRNIIPHVAPTHRCIAPDLIGMGKSGKPDLGYFFDDHVRFMDAFIEALGLEEVVLVIHDWGSALGFHWAKRNPERVKGIAFMEFIRPIPTWDEWPEFARETFQAFRTTDVGRELIIDQNVFIEGTLPMGVVRPLTEVEMDHYREPFLNPVDREPLWRFPNELPIAGEPANIVALVEEYMDWLRQSPVPKLLFWGTPGVLIPPAEAARLAKSLPNCKAVDIGPGLNLLQEDNPDLIGSEIARWLSTLEISGGSGGSGGGGSGGMVFTLEDFVGDWEQTAAYNLDQVLEQGGVSSLLQNLAVSVTPIQRIVRSGENALKIDIHVIIPYEGLSADQMAQIEEVFKVVYPVDDHHFKVILPYGTLVIDGVTPNMLNYFGRPYEGIAVFDGKKITVTGTLWNGNKIIDERLITPDGSMLFRVTINSGSGHHHHHH

SEQ ID NO: 3994 - protein, 457 aa, Synthetic construct
MFHYVDVGPRDGTPVLFLHGNPTSSYVWRNIIPHVAPTHRCIAPDLIGMGKSGKPDLGYFFDDHVRFMDAFIEALGLEEVVLVIHDWGSALGFHWAKRNPERVKGIAFMEFIRPIPTWDEWPEFARETFQAFRTTDVGRELIIDQNVFIEGTLPMGVVRPLTEVEMDHYREPFLNPVDREPLWRFPNELPIAGEPANIVALVEEYMDWLHQSPVPKLLFWGTPGVLIPPAEAAELAKSLPNCKAVDIGPGLNLLQEDNPDLIGSEIARWLSTLEISGGSGGSGGGGSGGMVFTLEDFVGDWEQTAAYNLDQVLEQGGVSSLLQNLAVSVTPIQRIVRSGENALKIDIHVIIPYEGLSADQMAQIEEVFKVVYPVDDHHFKVILPYGTLVIDGVTPNMLNYFGRPYEGIAVFDGKKITVTGTLWNGNKIIDERLITPDGSMLFRVTINSGSGHHHHHH

SEQ ID NO: 3995 - protein, 457 aa, Synthetic construct
MFHYVDVGPRDGTPVLFLHGNPTSSYVWRNIIPHVAPTHRCIAPDLIGMGKSGKPDLGYFFDDHVRFMDAFIEALGLEEVVLVIHDWGSALGFHWAKRNPERVKGIAFMEFIRPIPTWDEWPEFARETFQAFRTTDVGRELIIDQNVFIEGTLPMGVVRPLTEVEMDHYREPFLNPVDREPLWRFPNELPIAGEPANIVALVEEYMDWLHQSPVPKLLFWGTPGVLIPPAEAARLAKSLPNCTAVDIGPGLNLLQEDNPDLIGSEIARWLSTLEISGGSGGSGGGGSGGMVFTLEDFVGDWEQTAAYNLDQVLEQGGVSSLLQNLAVSVTPIQRIVRSGENALKIDIHVIIPYEGLSADQMAQIEEVFKVVYPVDDHHFKVILPYGTLVIDGVTPNMLNYFGRPYEGIAVFDGKKITVTGTLWNGNKIIDERLITPDGSMLFRVTINSGSGHHHHHH

SEQ ID NO: 3996 - protein, 457 aa, Synthetic construct
MFHYVDVGPRDGTPVLFLHGNPTSSYVWRNIIPHVAPTHRCIAPDLIGMGKSGKPDLGYFFDDHVRFMDAFIEALGLEEVVLVIHDWGSALGFHWAKRNPERVKGIAFMEFIRPIPTWDEWPEFARETFQAFRTTDVGRELIIDQNVFIEGTLPMGVVRPLTEVEMDHYREPFLNPVDREPLWRFPNELPIAGEPANIVALVEEYMDWLHQSPVPKLLFWGTPGVLIPPAEAARLAKSLPNCRAVDIGPGLNLLQEDNPDLIGSEIARWLSTLEISGGSGGSGGGGSGGMVFTLEDFVGDWEQTAAYNLDQVLEQGGVSSLLQNLAVSVTPIQRIVRSGENALKIDIHVIIPYEGLSADQMAQIEEVFKVVYPVDDHHFKVILPYGTLVIDGVTPNMLNYFGRPYEGIAVFDGKKITVTGTLWNGNKIIDERLITPDGSMLFRVTINSGSGHHHHHH

SEQ ID NO: 3997 - protein, 457 aa, Synthetic construct
MFHYVDVGPRDGTPVLFLHGNPTSSYVWRNIIPHVAPTHRCIAPDLIGMGKSGKPDLGYFFDDHVRFMDAFIEALGLEEVVLVIHDWGSALGFHWAKRNPERVKGIAFMEFIRPIPTWDEWPEFARETFQAFRTTDVGRELIIDQNVFIEGTLPMGVVRPLTEVEMDHYREPFLNPVDREPLWRFPNELPIAGEPANIVALVEEYMDWLHQSPVPKLLFWGTPGVLIPPAEAARLAKSLPNCKAVDIGPGLNLLQEDNPQLIGSEIARWLSTLEISGGSGGSGGGGSGGMVFTLEDFVGDWEQTAAYNLDQVLEQGGVSSLLQNLAVSVTPIQRIVRSGENALKIDIHVIIPYEGLSADQMAQIEEVFKVVYPVDDHHFKVILPYGTLVIDGVTPNMLNYFGRPYEGIAVFDGKKITVTGTLWNGNKIIDERLITPDGSMLFRVTINSGSGHHHHHH

SEQ ID NO: 3998 - protein, 457 aa, Synthetic construct
MFHYVDVGPRDGTPVLFLHGNPTSSYVWRNIIPHVAPTHRCIAPDLIGMGKSGKPDLGYFFDDHVRFMDAFIEALGLEEVVLVIHDWGSALGFHWAKRNPERVKGIAFMEFIRPIPTWDEWPEFARETFQAFRTTDVGRELIIDQNVFIEGTLPMGVVRPLTEVEMDHYREPFLNPVDREPLWRFPNELPIAGEPANIVALVEEYMDWLHQSPVPKLLFWGTPGVLIPPAEAARLAKSLPNCKAVDIGPGLNLLQEDNPGLIGSEIARWLSTLEISGGSGGSGGGGSGGMVFTLEDFVGDWEQTAAYNLDQVLEQGGVSSLLQNLAVSVTPIQRIVRSGENALKIDIHVIIPYEGLSADQMAQIEEVFKVVYPVDDHHFKVILPYGTLVIDGVTPNMLNYFGRPYEGIAVFDGKKITVTGTLWNGNKIIDERLITPDGSMLFRVTINSGSGHHHHHH

SEQ ID NO: 3999 - protein, 457 aa, Synthetic construct
MFHYVDVGPRDGTPVLFLHGNPTSSYVWRNIIPHVAPTHRCIAPDLIGMGKSGKPDLGYFFDDHVRFMDAFIEALGLEEVVLVIHDWGSALGFHWAKRNPERVKGIAFMEFIRPIPTWDEWPEFARETFQAFRTTDVGRELIIDQNVFIEGTLPMGVVRPLTEVEMDHYREPFLNPVDREPLWRFPNELPIAGEPANIVALVEEYMDWLHQSPVPKLLFWGTPGVLIPPAEAARLAKSLPNCKAVDIGPGLNLLQEDNPDLIGAEIARWLSTLEISGGSGGSGGGGSGGMVFTLEDFVGDWEQTAAYNLDQVLEQGGVSSLLQNLAVSVTPIQRIVRSGENALKIDIHVIIPYEGLSADQMAQIEEVFKVVYPVDDHHFKVILPYGTLVIDGVTPNMLNYFGRPYEGIAVFDGKKITVTGTLWNGNKIIDERLITPDGSMLFRVTINSGSGHHHHHH

SEQ ID NO: 4000 - protein, 457 aa, Synthetic construct
MFHYVDVGPRDGTPVLFLHGNPTSSYVWRNIIPHVAPTHRCIAPDLIGMGKSGKPDLGYFFDDHVRFMDAFIEALGLEEVVLVIHDWGSALGFHWAKRNPERVKGIAFMEFIRPIPTWDEWPEFARETFQAFRTTDVGRELIIDQNVFIEGTLPMGVVRPLTEVEMDHYREPFLNPVDREPLWRFPNELPIAGEPANIVALVEEYMDWLHQSPVPKLLFWGTPGVLIPPAEAARLAKSLPNCKAVDIGPGLNLLQEDNPDLIGEEIARWLSTLEISGGSGGSGGGGSGGMVFTLEDFVGDWEQTAAYNLDQVLEQGGVSSLLQNLAVSVTPIQRIVRSGENALKIDIHVIIPYEGLSADQMAQIEEVFKVVYPVDDHHFKVILPYGTLVIDGVTPNMLNYFGRPYEGIAVFDGKKITVTGTLWNGNKIIDERLITPDGSMLFRVTINSGSGHHHHHH

SEQ ID NO: 4001 - protein, 457 aa, Synthetic construct
MFHYVDVGPRDGTPVLFLHGNPTSSYVWRNIIPHVAPTHRCIAPDLIGMGKSGKPDLGYFFDDHVRFMDAFIEALGLEEVVLVIHDWGSALGFHWAKRNPERVKGIAFMEFIRPIPTWDEWPEFARETFQAFRTTDVGRELIIDQNVFIEGTLPMGVVRPLTEVEMDHYREPFLNPVDREPLWRFPNELPIAGEPANIVALVEEYMDWLHQSPVPKLLFWGTPGVLIPPAEAARLAKSLPNCKAVDIGPGLNLLQEDNPDLIGKEIARWLSTLEISGGSGGSGGGGSGGMVFTLEDFVGDWEQTAAYNLDQVLEQGGVSSLLQNLAVSVTPIQRIVRSGENALKIDIHVIIPYEGLSADQMAQIEEVFKVVYPVDDHHFKVILPYGTLVIDGVTPNMLNYFGRPYEGIAVFDGKKITVTGTLWNGNKIIDERLITPDGSMLFRVTINSGSGHHHHHH

SEQ ID NO: 4002 - protein, 457 aa, Synthetic construct
MFHYVDVGPRDGTPVLFLHGNPTSSYVWRNIIPHVAPTHRCIAPDLIGMGKSGKPDLGYFFDDHVRFMDAFIEALGLEEVVLVIHDWGSALGFHWAKRNPERVKGIAFMEFIRPIPTWDEWPEFARETFQAFRTTDVGRELIIDQNVFIEGTLPMGVVRPLTEVEMDHYREPFLNPVDREPLWRFPNELPIAGEPANIVALVEEYMDWLHQSPVPKLLFWGTPGVLIPPAEAARLAKSLPNCKAVDIGPGLNLLQEDNPDLIGSQIARWLSTLEISGGSGGSGGGGSGGMVFTLEDFVGDWEQTAAYNLDQVLEQGGVSSLLQNLAVSVTPIQRIVRSGENALKIDIHVIIPYEGLSADQMAQIEEVFKVVYPVDDHHFKVILPYGTLVIDGVTPNMLNYFGRPYEGIAVFDGKKITVTGTLWNGNKIIDERLITPDGSMLFRVTINSGSGHHHHHH

SEQ ID NO: 4003 - protein, 457 aa, Synthetic construct
MFHYVDVGPRDGTPVLFLHGNPTSSYVWRNIIPHVAPTHRCIAPDLIGMGKSGKPDLGYFFDDHVRFMDAFIEALGLEEVVLVIHDWGSALGFHWAKRNPERVKGIAFMEFIRPIPTWDEWPEFARETFQAFRTTDVGRELIIDQNVFIEGTLPMGVVRPLTEVEMDHYREPFLNPVDREPLWRFPNELPIAGEPANIVALVEEYMDWLHQSPVPKLLFWGTPGVLIPPAEAARLAKSLPNCKAVDIGPGLNLLQEDNPDLIGSEIVRWLSTLEISGGSGGSGGGGSGGMVFTLEDFVGDWEQTAAYNLDQVLEQGGVSSLLQNLAVSVTPIQRIVRSGENALKIDIHVIIPYEGLSADQMAQIEEVFKVVYPVDDHHFKVILPYGTLVIDGVTPNMLNYFGRPYEGIAVFDGKKITVTGTLWNGNKIIDERLITPDGSMLFRVTINSGSGHHHHHH

SEQ ID NO: 4004 - protein, 457 aa, Synthetic construct
MFHYVDVGPRDGTPVLFLHGNPTSSYVWRNIIPHVAPTHRCIAPDLIGMGKSGKPDLGYFFDDHVRFMDAFIEALGLEEVVLVIHDWGSALGFHWAKRNPERVKGIAFMEFIRPIPTWDEWPEFARETFQAFRTTDVGRELIIDQNVFIEGTLPMGVVRPLTEVEMDHYREPFLNPVDREPLWRFPNELPIAGEPANIVALVEEYMDWLHQSPVPKLLFWGTPGVLIPPAEAARLAKSLPNCKAVDIGPGLNLLQEDNPDLIGSEIRRWLSTLEISGGSGGSGGGGSGGMVFTLEDFVGDWEQTAAYNLDQVLEQGGVSSLLQNLAVSVTPIQRIVRSGENALKIDIHVIIPYEGLSADQMAQIEEVFKVVYPVDDHHFKVILPYGTLVIDGVTPNMLNYFGRPYEGIAVFDGKKITVTGTLWNGNKIIDERLITPDGSMLFRVTINSGSGHHHHHH

SEQ ID NO: 4005 - protein, 457 aa, Synthetic construct
MFHYVDVGPRDGTPVLFLHGNPTSSYVWRNIIPHVAPTHRCIAPDLIGMGKSGKPDLGYFFDDHVRFMDAFIEALGLEEVVLVIHDWGSALGFHWAKRNPERVKGIAFMEFIRPIPTWDEWPEFARETFQAFRTTDVGRELIIDQNVFIEGTLPMGVVRPLTEVEMDHYREPFLNPVDREPLWRFPNELPIAGEPANIVALVEEYMDWLHQSPVPKLLFWGTPGVLIPPAEAARLAKSLPNCKAVDIGPGLNLLQEDNPDLIGSEIARWLSTQEISGGSGGSGGGGSGGMVFTLEDFVGDWEQTAAYNLDQVLEQGGVSSLLQNLAVSVTPIQRIVRSGENALKIDIHVIIPYEGLSADQMAQIEEVFKVVYPVDDHHFKVILPYGTLVIDGVTPNMLNYFGRPYEGIAVFDGKKITVTGTLWNGNKIIDERLITPDGSMLFRVTINSGSGHHHHHH

SEQ ID NO: 4006 - protein, 457 aa, Synthetic construct
MFHYVDVGPRDGTPVLFLHGNPTSSYVWRNIIPHVAPTHRCIAPDLIGMGKSGKPDLGYFFDDHVRFMDAFIEALGLEEVVLVIHDWGSALGFHWAKRNPERVKGIAFMEFIRPIPTWDEWPEFARETFQAFRTTDVGRELIIDQNVFIEGTLPMGVVRPLTEVEMDHYREPFLNPVDREPLWRFPNELPIAGEPANIVALVEEYMDWLHQSPVPKLLFWGTPGVLIPPAEAARLAKSLPNCKAVDIGPGLNLLQEDNPDLIGSEIARWLSTHEISGGSGGSGGGGSGGMVFTLEDFVGDWEQTAAYNLDQVLEQGGVSSLLQNLAVSVTPIQRIVRSGENALKIDIHVIIPYEGLSADQMAQIEEVFKVVYPVDDHHFKVILPYGTLVIDGVTPNMLNYFGRPYEGIAVFDGKKITVTGTLWNGNKIIDERLITPDGSMLFRVTINSGSGHHHHHH

SEQ ID NO: 4007 - protein, 457 aa, Synthetic construct
MFHYVDVGPRDGTPVLFLHGNPTSSYVWRNIIPHVAPTHRCIAPDLIGMGKSGKPDLGYFFDDHVRFMDAFIEALGLEEVVLVIHDWGSALGFHWAKRNPERVKGIAFMEFIRPIPTWDEWPEFARETFQAFRTTDVGRELIIDQNVFIEGTLPMGVVRPLTEVEMDHYREPFLNPVDREPLWRFPNELPIAGEPANIVALVEEYMDWLHQSPVPKLLFWGTPGVLIPPAEAARLAKSLPNCKAVDIGPGLNLLQEDNPDLIGSEIARWLSTLETSGGSGGSGGGGSGGMVFTLEDFVGDWEQTAAYNLDQVLEQGGVSSLLQNLAVSVTPIQRIVRSGENALKIDIHVIIPYEGLSADQMAQIEEVFKVVYPVDDHHFKVILPYGTLVIDGVTPNMLNYFGRPYEGIAVFDGKKITVTGTLWNGNKIIDERLITPDGSMLFRVTINSGSGHHHHHH

SEQ ID NO: 4008 - protein, 457 aa, Synthetic construct
MFHYVDVGPRDGTPVLFLHGNPTSSYVWRNIIPHVAPTHRCIAPDLIGMGKSGKPDLGYFFDDHVRFMDAFIEALGLEEVVLVIHDWGSALGFHWAKRNPERVKGIAFMEFIRPIPTWDEWPEFARETFQAFRTTDVGRELIIDQNVFIEGTLPMGVVRPLTEVEMDHYREPFLNPVDREPLWRFPNELPIAGEPANIVALVEEYMDWLHQSPVPKLLFWGTPGVLIPPAEAARLAKSLPNCKAVDIGPGLNLLQEDNPDLIGSEIARWLSTLEIEGGSGGSGGGGSGGMVFTLEDFVGDWEQTAAYNLDQVLEQGGVSSLLQNLAVSVTPIQRIVRSGENALKIDIHVIIPYEGLSADQMAQIEEVFKVVYPVDDHHFKVILPYGTLVIDGVTPNMLNYFGRPYEGIAVFDGKKITVTGTLWNGNKIIDERLITPDGSMLFRVTINSGSGHHHHHH

SEQ ID NO: 4009 - protein, 457 aa, Synthetic construct
MFHYVDVGPRDGTPVLFLHGNPTSSYVWRNIIPHVAPTHRCIAPDLIGMGKSGKPDLGYFFDDHVRFMDAFIEALGLEEVVLVIHDWGSALGFHWAKRNPERVKGIAFMEFIRPIPTWDEWPEFARETFQAFRTTDVGRELIIDQNVFIEGTLPMGVVRPLTEVEMDHYREPFLNPVDREPLWRFPNELPIAGEPANIVALVEEYMDWLHQSPVPKLLFWGTPGVLIPPAEAARLAKSLPNCKAVDIGPGLNLLQEDNPDLIGSEIARWLSTLEIPGGSGGSGGGGSGGMVFTLEDFVGDWEQTAAYNLDQVLEQGGVSSLLQNLAVSVTPIQRIVRSGENALKIDIHVIIPYEGLSADQMAQIEEVFKVVYPVDDHHFKVILPYGTLVIDGVTPNMLNYFGRPYEGIAVFDGKKITVTGTLWNGNKIIDERLITPDGSMLFRVTINSGSGHHHHHH

SEQ ID NO: 4010 - protein, 457 aa, Synthetic construct
MFHYVDVGPRDGTPVLFLHGNPTSSYVWRNIIPHVAPTHRCIAPDLIGFGKSGKPDLGYFFDDHVRFMDAFIEALGLEEVVLVIHDWGSALGFHWAKRNPERVKGIAFMEFIRPIPTWDEWPEFARETFQAFRTTDVGRKLIIDQNVFIEGTLPMGVVRPLTEVEMDHYREPFLNPEDREPLWRFPNELPIAGEPANIVALVEEYMDWLHQSPVPKLLFWGTPGVLIPPAEAARLAKSLPNCKAVDIGPGLNLLQEDNPDLIGSEIARWLSTLEISGGSGGSGGGGSGGMVFTLEDFVGDWEQTAAYNLDQVLEQGGVSSLLQNLAVSVTPIQRIVRSGENALKIDIHVIIPYEGLSADQMAQIEEVFKVVYPVDDHHFKVILPYGTLVIDGVTPNMLNYFGRPYEGIAVFDGKKITVTGTLWNGNKIIDERLITPDGSMLFRVTINSGSGHHHHHH

SEQ ID NO: 4011 - protein, 457 aa, Synthetic construct
MFHYVDEGPRDGTPVLFLHGNPTSSYVWRNIIPHVAPTHRCIAPDLIGMGKSDKPDLGYFFDDHVRFMDAFIEALGLEEVVLVIHDWGSALGFHWAKRNPERVKGIAFMEFIRPIPDWDEWPEFARETFQRFRTTDVGRKLIIDQNVFIEGTLPMGVVRPLTEVEMDHYREPFLNPVDREPLWRFPNELPIAGEPANIVALVEEYMDWLHQSPVPKLLFWGTPGVLIPPAEAARLAKSLPNCKAVDIGPGLNLLQEDNPDLIGSEIARWLKTLEISGGSGGSGGGGSGGMVFTLEDFVGDWEQTAAYNLDQVLEQGGVSSLLQNLAVSVTPIQRIVRSGENALKIDIHVIIPYEGLSADQMAQIEEVFKVVYPVDDHHFKVILPYGTLVIDGVTPNMLNYFGRPYEGIAVFDGKKITVTGTLWNGNKIIDERLITPDGSMLFRVTINSGSGHHHHHH

SEQ ID NO: 4012 - protein, 457 aa, Synthetic construct
MFHYVDVGPRDGTPVLFLHGNPTSSYVWRNIIPHVAPTHRCIAPDLIGMGKSDKPDLGYFFDDHVRFMDAFIEALGLEEVVLVIHDWGSALGFHWAKRNPERVKGIAFMEFIRPIPTWDEWPEFARETFQAFRTTDVGRKLIIDQNVFIEGTLPMGVVRPLTEVEMDHYREPFLNPVDREPLWRFPNELPIAGEPANIVALVEEYMDWLHQSPVPKLLFWGTPGVLIPPAEAARLAKSLPNCKAVDIGPGLNLLQEDNPDLIGSEIARWLKTLEISGGSGGSGGGGSGGMVFTLEDFVGDWEQTAAYNLDQVLEQGGVSSLLQNLAVSVTPIQRIVRSGENALKIDIHVIIPYEGLSADQMAQIEEVFKVVYPVDDHHFKVILPYGTLVIDGVTPNMLNYFGRPYEGIAVFDGKKITVTGTLWNGNKIIDERLITPDGSMLFRVTINSGSGHHHHHH

SEQ ID NO: 4013 - protein, 457 aa, Synthetic construct
MFHYVDVGPRDGTPVLFLHGNPTSSYVWRNIIPHVAPTHRCIAPDLIGMGKSDKPDLGYFFDDHVRFMDAFIEALGLEEVVLVIHDWGSALGFHWAKRNPERVKGIAFMEFIRPIPTWDEWPEFARETFQAFRTTDVGRKLIIDQNVFIEGTLPMGVVRPLTEVEMDHYREPFLNPVDREPLWRFPNELPIAGEPANIVKLVEEYMDWLHQSPVPKLLFFGTPGVLIPPAEAARLAKSLPNCKAVDIGPGLNLLQEDNPDLIGSEIARWLSTLEISGGSGGSGGGGSGGMVFTLEDFVGDWEQTAAYNLDQVLEQGGVSSLLQNLAVSVTPIQRIVRSGENALKIDIHVIIPYEGLSADQMAQIEEVFKVVYPVDDHHFKVILPYGTLVIDGVTPNMLNYFGRPYEGIAVFDGKKITVTGTLWNGNKIIDERLITPDGSMLFRVTINSGSGHHHHHH

SEQ ID NO: 4014 - protein, 457 aa, Synthetic construct
MFHYVDVGPRDGTPVLFLHGNPTSSYVWRNIIPHVAPTHRCIAPDLIGMGKSDKPDLGYFFDDHVRFVDAFIEALGLEEVVLVIHDWGSALGFHWAKRNPERVKGIAFMEFIRPIPTWDEWPEFARETFQRFRTTDVGRKLIIDQNVFIEGTLPMGVVRPLTEVEMDHYREPFLNPVDREPLWRFPNELPIAGEPANIVALVEEYMDWLHQSPVPKLLFFGTPGVLIPPAEAARLAKSLPNCKAVDIGPGLNLLQEDNPDLIGSEIARWLKTLEISGGSGGSGGGGSGGMVFTLEDFVGDWEQTAAYNLDQVLEQGGVSSLLQNLAVSVTPIQRIVRSGENALKIDIHVIIPYEGLSADQMAQIEEVFKVVYPVDDHHFKVILPYGTLVIDGVTPNMLNYFGRPYEGIAVFDGKKITVTGTLWNGNKIIDERLITPDGSMLFRVTINSGSGHHHHHH

SEQ ID NO: 4015 - protein, 457 aa, Synthetic construct
MFHYVDEGPRDGTPVLFLHGNPTSSYVWRNIIPHVAPTHRCIAPDLIGMGKSDKPDLGYFFDDHVRFMDAFIEALGLEEVVLVIHDWGSALGFHWAKRNPERVKGIAFMEFIRPIPTWDEWPEFARETFQAFRTTDVGRKLIIDQNVFIEGTLPMGVVRPLTEVEMDHYREPFLNPEDREPLWRFPNELPIAGEPANIVALVEEYMDWLHQSPVPKLLFFGTPGVLIPPAEAARLAKSLPNCKAVDIGPGLNLLQEDNPDLIGSEIARWLKTLEISGGSGGSGGGGSGGMVFTLEDFVGDWEQTAAYNLDQVLEQGGVSSLLQNLAVSVTPIQRIVRSGENALKIDIHVIIPYEGLSADQMAQIEEVFKVVYPVDDHHFKVILPYGTLVIDGVTPNMLNYFGRPYEGIAVFDGKKITVTGTLWNGNKIIDERLITPDGSMLFRVTINSGSGHHHHHH

SEQ ID NO: 4016 - protein, 457 aa, Synthetic construct
MFHYVDVGPRDGTPVLFLHGNPTSSYVWRNIIPHVAPTHRCIAPDLIGMGKSDKPDLGYFFDDHVRFVDAFIEALGLEEVVLVIHDWGSALGFHWAKRNPERVKGIAFMEFIRPIPDWDEWPEFARETFQAFRTTDVGRKLIIDQNVFIEGTLPMGVVRPLTEVEMDHYREPFLNPVDREPLWRFPNELPIAGEPANIVKLVEEYMDWLHQSPVPKLLFWGTPGVLIPPAEAARLAKSLPNCKAVDIGPGLNLLQEDNPDLIGSEIARWLSTLEISGGSGGSGGGGSGGMVFTLEDFVGDWEQTAAYNLDQVLEQGGVSSLLQNLAVSVTPIQRIVRSGENALKIDIHVIIPYEGLSADQMAQIEEVFKVVYPVDDHHFKVILPYGTLVIDGVTPNMLNYFGRPYEGIAVFDGKKITVTGTLWNGNKIIDERLITPDGSMLFRVTINSGSGHHHHHH

SEQ ID NO: 4017 - protein, 457 aa, Synthetic construct
MFHYVDEGPRDGTPVLFLHGNPTSSYVWRNIIPHVAPTHRCIAPDLIGMGKSDKPDLGYFFDDHVRFMDAFIEALGLEEVVLVIHDWGSALGFHWAKRNPERVKGIAFMEFIRPIPDWDEWPEFARETFQAFRTTDVGRKLIIDQNVFIEGTLPMGVVRPLTEVEMDHYREPFLNPEDREPLWRFPNELPIAGEPANIVKLVEEYMDWLHQSPVPKLLFWGTPGVLIPPAEAARLAKSLPNCKAVDIGPGLNLLQEDNPDLIGSEIARWLSTLEISGGSGGSGGGGSGGMVFTLEDFVGDWEQTAAYNLDQVLEQGGVSSLLQNLAVSVTPIQRIVRSGENALKIDIHVIIPYEGLSADQMAQIEEVFKVVYPVDDHHFKVILPYGTLVIDGVTPNMLNYFGRPYEGIAVFDGKKITVTGTLWNGNKIIDERLITPDGSMLFRVTINSGSGHHHHHH

SEQ ID NO: 4018 - protein, 457 aa, Synthetic construct
MFHYVDVGPRDGTPVLFLHGNPTSSYVWRNIIPHVAPTHRCIAPDLIGMGKSDKPDLGYFFDDHVRFMDAFIEALGLEEVVLVIHDWGSALGFHWAKRNPERVKGIAFMEFIRPIPTWDEWPEFARETFQAFRTTDVGRKLIIDQNVFIEGTLPMGVVRPLTEVEMDHYREPFLNPVDREPLWRFPNELPIAGEPANIVALVEEYMDWLHQSPVPKLLFFGTPGVLIPPAEAARLAKSLPNCKAVDIGPGLNLLQEDNPDLIGSEIARWLSTLEISGGSGGSGGGGSGGMVFTLEDFVGDWEQTAAYNLDQVLEQGGVSSLLQNLAVSVTPIQRIVRSGENALKIDIHVIIPYEGLSADQMAQIEEVFKVVYPVDDHHFKVILPYGTLVIDGVTPNMLNYFGRPYEGIAVFDGKKITVTGTLWNGNKIIDERLITPDGSMLFRVTINSGSGHHHHHH

SEQ ID NO: 4019 - protein, 457 aa, Synthetic construct
MFHYVDEGPRDGTPVLFLHGNPTSSYVWRNIIPHVAPTHRCIAPDLIGFGKSGKPDLGYFFDDHVRFVDAFIEALGLEEVVLVIHDWGSALGFHWAKRNPERVKGIAFMEFIRPIPTWDEWPEFARETFQAFRTTDVGRKLIIDQNVFIEGTLPMGVVRPLTEVEMDHYREPFLNPVDREPLWRFPNELPIAGEPANIVALVEEYMDWLHQSPVPKLLFWGTPGVLIPPAEAARLAKSLPNCKAVDIGPGLNLLQEDNPDLIGSEIARWLKTLEISGGSGGSGGGGSGGMVFTLEDFVGDWEQTAAYNLDQVLEQGGVSSLLQNLAVSVTPIQRIVRSGENALKIDIHVIIPYEGLSADQMAQIEEVFKVVYPVDDHHFKVILPYGTLVIDGVTPNMLNYFGRPYEGIAVFDGKKITVTGTLWNGNKIIDERLITPDGSMLFRVTINSGSGHHHHHH

SEQ ID NO: 4020 - protein, 457 aa, Synthetic construct
MFHYVDVGPRDGTPVLFLHGNPTSSYVWRNIIPHVAPTHRCIAPDLIGFGKSGKPDLGYFFDDHVRFMDAFIEALGLEEVVLVIHDWGSALGFHWAKRNPERVKGIAFMEFIRPIPDWDEWPEFARETFQAFRTTDVGRKLIIDQNVFIEGTLPMGVVRPLTEVEMDHYREPFLNPVDREPLWRFPNELPIAGEPANIVALVEEYMDWLHQSPVPKLLFWGTPGVLIPPAEAARLAKSLPNCKAVDIGPGLNLLQEDNPDLIGSEIARWLSTLEISGGSGGSGGGGSGGMVFTLEDFVGDWEQTAAYNLDQVLEQGGVSSLLQNLAVSVTPIQRIVRSGENALKIDIHVIIPYEGLSADQMAQIEEVFKVVYPVDDHHFKVILPYGTLVIDGVTPNMLNYFGRPYEGIAVFDGKKITVTGTLWNGNKIIDERLITPDGSMLFRVTINSGSGHHHHHH

SEQ ID NO: 4021 - protein, 457 aa, Synthetic construct
MFHYVDEGPRDGTPVLFLHGNPTSSYVWRNIIPHVAPTHRCIAPDLIGFGKSGKPDLGYFFDDHVRFMDAFIEALGLEEVVLVIHDWGSALGFHWAKRNPERVKGIAFMEFIRPIPTWDEWPEFARETFQAFRTTDVGRKLIIDQNVFIEGTLPMGVVRPLTEVEMDHYREPFLNPVDREPLWRFPNELPIAGEPANIVKLVEEYMDWLHQSPVPKLLFWGTPGVLIPPAEAARLAKSLPNCKAVDIGPGLNLLQEDNPDLIGSEIARWLSTLEISGGSGGSGGGGSGGMVFTLEDFVGDWEQTAAYNLDQVLEQGGVSSLLQNLAVSVTPIQRIVRSGENALKIDIHVIIPYEGLSADQMAQIEEVFKVVYPVDDHHFKVILPYGTLVIDGVTPNMLNYFGRPYEGIAVFDGKKITVTGTLWNGNKIIDERLITPDGSMLFRVTINSGSGHHHHHH

SEQ ID NO: 4022 - protein, 457 aa, Synthetic construct
MFHYVDEGPRDGTPVLFLHGNPTSSYVWRNIIPHVAPTHRCIAPDLIGFGKSGKPDLGYFFDDHVRFVDAFIEALGLEEVVLVIHDWGSALGFHWAKRNPERVKGIAFMEFIRPIPDWDEWPEFARETFQAFRTTDVGRKLIIDQNVFIEGTLPMGVVRPLTEVEMDHYREPFLNPEDREPLWRFPNELPIAGEPANIVALVEEYMDWLHQSPVPKLLFWGTPGVLIPPAEAARLAKSLPNCKAVDIGPGLNLLQEDNPDLIGSEIARWLSTLEISGGSGGSGGGGSGGMVFTLEDFVGDWEQTAAYNLDQVLEQGGVSSLLQNLAVSVTPIQRIVRSGENALKIDIHVIIPYEGLSADQMAQIEEVFKVVYPVDDHHFKVILPYGTLVIDGVTPNMLNYFGRPYEGIAVFDGKKITVTGTLWNGNKIIDERLITPDGSMLFRVTINSGSGHHHHHH

SEQ ID NO: 4023 - protein, 457 aa, Synthetic construct
MFHYVDEGPRDGTPVLFLHGNPTSSYVWRNIIPHVAPTHRCIAPDLIGMGKSDKPDLGYFFDDHVRFMDAFIEALGLEEVVLVIHDWGSALGFHWAKRNPERVKGIAFMEFIRPIPTWDEWPEFARETFQAFRTTDVGRKLIIDQNVFIEGTLPMGVVRPLTEVEMDHYREPFLNPVDREPLWRFPNELPIAGEPANIVKLVEEYMDWLHQSPVPKLLFFGTPGVLIPPAEAARLAKSLPNCKAVDIGPGLNLLQEDNPDLIGSEIARWLSTLEISGGSGGSGGGGSGGMVFTLEDFVGDWEQTAAYNLDQVLEQGGVSSLLQNLAVSVTPIQRIVRSGENALKIDIHVIIPYEGLSADQMAQIEEVFKVVYPVDDHHFKVILPYGTLVIDGVTPNMLNYFGRPYEGIAVFDGKKITVTGTLWNGNKIIDERLITPDGSMLFRVTINSGSGHHHHHH

SEQ ID NO: 4024 - protein, 457 aa, Synthetic construct
MFHYVDEGPRDGTPVLFLHGNPTSSYVWRNIIPHVAPTHRCIAPDLIGMGKSDKPDLGYFFDDHVRFMDAFIEALGLEEVVLVIHDWGSALGFHWAKRNPERVKGIAFMEFIRPIPDWDEWPEFARETFQAFRTTDVGRKLIIDQNVFIEGTLPMGVVRPLTEVEMDHYREPFLNPVDREPLWRFPNELPIAGEPANIVKLVEEYMDWLHQSPVPKLLFWGTPGVLIPPAEAARLAKSLPNCKAVDIGPGLNLLQEDNPDLIGSEIARWLKTLEISGGSGGSGGGGSGGMVFTLEDFVGDWEQTAAYNLDQVLEQGGVSSLLQNLAVSVTPIQRIVRSGENALKIDIHVIIPYEGLSADQMAQIEEVFKVVYPVDDHHFKVILPYGTLVIDGVTPNMLNYFGRPYEGIAVFDGKKITVTGTLWNGNKIIDERLITPDGSMLFRVTINSGSGHHHHHH

SEQ ID NO: 4025 - protein, 457 aa, Synthetic construct
MFHYVDEGPRDGTPVLFLHGNPTSSYVWRNIIPHVAPTHRCIAPDLIGMGKSDKPDLGYFFDDHVRFVDAFIEALGLEEVVLVIHDWGSALGFHWAKRNPERVKGIAFMEFIRPIPDWDEWPEFARETFQRFRTTDVGRKLIIDQNVFIEGTLPMGVVRPLTEVEMDHYREPFLNPVDREPLWRFPNELPIAGEPANIVKLVEEYMDWLHQSPVPKLLFFGTPGVLIPPAEAARLAKSLPNCKAVDIGPGLNLLQEDNPDLIGSEIARWLSTLEISGGSGGSGGGGSGGMVFTLEDFVGDWEQTAAYNLDQVLEQGGVSSLLQNLAVSVTPIQRIVRSGENALKIDIHVIIPYEGLSADQMAQIEEVFKVVYPVDDHHFKVILPYGTLVIDGVTPNMLNYFGRPYEGIAVFDGKKITVTGTLWNGNKIIDERLITPDGSMLFRVTINSGSGHHHHHH

SEQ ID NO: 4026 - protein, 457 aa, Synthetic construct
MFHYVDVGPRDGTPVLFLHGNPTSSYVWRNIIPHVAPTHRCIAPDLIGMGKSDKPDLGYFFDDHVRFMDAFIEALGLEEVVLVIHDWGSALGFHWAKRNPERVKGIAFMEFIRPIPDWDEWPEFARETFQRFRTTDVGRKLIIDQNVFIEGTLPMGVVRPLTEVEMDHYREPFLNPEDREPLWRFPNELPIAGEPANIVKLVEEYMDWLHQSPVPKLLFWGTPGVLIPPAEAARLAKSLPNCKAVDIGPGLNLLQEDNPDLIGSEIARWLKTLEISGGSGGSGGGGSGGMVFTLEDFVGDWEQTAAYNLDQVLEQGGVSSLLQNLAVSVTPIQRIVRSGENALKIDIHVIIPYEGLSADQMAQIEEVFKVVYPVDDHHFKVILPYGTLVIDGVTPNMLNYFGRPYEGIAVFDGKKITVTGTLWNGNKIIDERLITPDGSMLFRVTINSGSGHHHHHH

SEQ ID NO: 4027 - protein, 457 aa, Synthetic construct
MFHYVDVGPRDGTPVLFLHGNPTSSYVWRNIIPHVAPTHRCIAPDLIGMGKSDKPDLGYFFDDHVRFVDAFIEALGLEEVVLVIHDWGSALGFHWAKRNPERVKGIAFMEFIRPIPTWDEWPEFARETFQRFRTTDVGRKLIIDQNVFIEGTLPMGVVRPLTEVEMDHYREPFLNPEDREPLWRFPNELPIAGEPANIVALVEEYMDWLHQSPVPKLLFWGTPGVLIPPAEAARLAKSLPNCKAVDIGPGLNLLQEDNPDLIGSEIARWLKTLEISGGSGGSGGGGSGGMVFTLEDFVGDWEQTAAYNLDQVLEQGGVSSLLQNLAVSVTPIQRIVRSGENALKIDIHVIIPYEGLSADQMAQIEEVFKVVYPVDDHHFKVILPYGTLVIDGVTPNMLNYFGRPYEGIAVFDGKKITVTGTLWNGNKIIDERLITPDGSMLFRVTINSGSGHHHHHH

SEQ ID NO: 4028 - protein, 457 aa, Synthetic construct
MFHYVDVGPRDGTPVLFLHGNPTSSYVWRNIIPHVAPTHRCIAPDLIGMGKSDKPDLGYFFDDHVRFVDAFIEALGLEEVVLVIHDWGSALGFHWAKRNPERVKGIAFMEFIRPIPTWDEWPEFARETFQAFRTTDVGRKLIIDQNVFIEGTLPMGVVRPLTEVEMDHYREPFLNPVDREPLWRFPNELPIAGEPANIVALVEEYMDWLHQSPVPKLLFWGTPGVLIPPAEAARLAKSLPNCKAVDIGPGLNLLQEDNPDLIGSEIARWLSTLEISGGSGGSGGGGSGGMVFTLEDFVGDWEQTAAYNLDQVLEQGGVSSLLQNLAVSVTPIQRIVRSGENALKIDIHVIIPYEGLSADQMAQIEEVFKVVYPVDDHHFKVILPYGTLVIDGVTPNMLNYFGRPYEGIAVFDGKKITVTGTLWNGNKIIDERLITPDGSMLFRVTINSGSGHHHHHH

SEQ ID NO: 4029 - protein, 457 aa, Synthetic construct
MFHYVDVGPRDGTPVLFLHGNPTSSYVWRNIIPHVAPTHRCIAPDLIGFGKSGKPDLGYFFDDHVRFVDAFIEALGLEEVVLVIHDWGSALGFHWAKRNPERVKGIAFMEFIRPIPDWDEWPEFARETFQAFRTTDVGRKLIIDQNVFIEGTLPMGVVRPLTEVEMDHYREPFLNPVDREPLWRFPNELPIAGEPANIVALVEEYMDWLHQSPVPKLLFWGTPGVLIPPAEAARLAKSLPNCKAVDIGPGLNLLQEDNPDLIGSEIARWLKTLEISGGSGGSGGGGSGGMVFTLEDFVGDWEQTAAYNLDQVLEQGGVSSLLQNLAVSVTPIQRIVRSGENALKIDIHVIIPYEGLSADQMAQIEEVFKVVYPVDDHHFKVILPYGTLVIDGVTPNMLNYFGRPYEGIAVFDGKKITVTGTLWNGNKIIDERLITPDGSMLFRVTINSGSGHHHHHH

SEQ ID NO: 4030 - protein, 457 aa, Synthetic construct
MFHYVDVGPRDGTPVLFLHGNPTSSYVWRNIIPHVAPTHRCIAPDLIGMGKSDKPDLGYFFDDHVRFMDAFIEALGLEEVVLVIHDWGSALGFHWAKRNPERVKGIAFMEFIRPIPDWDEWPEFARETFQRFRTTDVGRKLIIDQNVFIEGTLPMGVVRPLTEVEMDHYREPFLNPEDREPLWRFPNELPIAGEPANIVALVEEYMDWLHQSPVPKLLFFGTPGVLIPPAEAARLAKSLPNCKAVDIGPGLNLLQEDNPDLIGSEIARWLSTLEISGGSGGSGGGGSGGMVFTLEDFVGDWEQTAAYNLDQVLEQGGVSSLLQNLAVSVTPIQRIVRSGENALKIDIHVIIPYEGLSADQMAQIEEVFKVVYPVDDHHFKVILPYGTLVIDGVTPNMLNYFGRPYEGIAVFDGKKITVTGTLWNGNKIIDERLITPDGSMLFRVTINSGSGHHHHHH

SEQ ID NO: 4031 - protein, 457 aa, Synthetic construct
MFHYVDVGPRDGTPVLFLHGNPTSSYVWRNIIPHVAPTHRCIAPDLIGMGKSDKPDLGYFFDDHVRFMDAFIEALGLEEVVLVIHDWGSALGFHWAKRNPERVKGIAFMEFIRPIPTWDEWPEFARETFQAFRTTDVGRKLIIDQNVFIEGTLPMGVVRPLTEVEMDHYREPFLNPEDREPLWRFPNELPIAGEPANIVKLVEEYMDWLHQSPVPKLLFFGTPGVLIPPAEAARLAKSLPNCKAVDIGPGLNLLQEDNPDLIGSEIARWLKTLEISGGSGGSGGGGSGGMVFTLEDFVGDWEQTAAYNLDQVLEQGGVSSLLQNLAVSVTPIQRIVRSGENALKIDIHVIIPYEGLSADQMAQIEEVFKVVYPVDDHHFKVILPYGTLVIDGVTPNMLNYFGRPYEGIAVFDGKKITVTGTLWNGNKIIDERLITPDGSMLFRVTINSGSGHHHHHH

SEQ ID NO: 4032 - protein, 457 aa, Synthetic construct
MFHYVDVGPRDGTPVLFLHGNPTSSYVWRNIIPHVAPTHRCIAPDLIGMGKSDKPDLGYFFDDHVRFVDAFIEALGLEEVVLVIHDWGSALGFHWAKRNPERVKGIAFMEFIRPIPTWDEWPEFARETFQAFRTTDVGRKLIIDQNVFIEGTLPMGVVRPLTEVEMDHYREPFLNPVDREPLWRFPNELPIAGEPANIVKLVEEYMDWLHQSPVPKLLFWGTPGVLIPPAEAARLAKSLPNCKAVDIGPGLNLLQEDNPDLIGSEIARWLKTLEISGGSGGSGGGGSGGMVFTLEDFVGDWEQTAAYNLDQVLEQGGVSSLLQNLAVSVTPIQRIVRSGENALKIDIHVIIPYEGLSADQMAQIEEVFKVVYPVDDHHFKVILPYGTLVIDGVTPNMLNYFGRPYEGIAVFDGKKITVTGTLWNGNKIIDERLITPDGSMLFRVTINSGSGHHHHHH

SEQ ID NO: 4033 - protein, 457 aa, Synthetic construct
MFHYVDEGPRDGTPVLFLHGNPTSSYVWRNIIPHVAPTHRCIAPDLIGMGKSDKPDLGYFFDDHVRFMDAFIEALGLEEVVLVIHDWGSALGFHWAKRNPERVKGIAFMEFIRPIPDWDEWPEFARETFQRFRTTDVGRKLIIDQNVFIEGTLPMGVVRPLTEVEMDHYREPFLNPVDREPLWRFPNELPIAGEPANIVALVEEYMDWLHQSPVPKLLFFGTPGVLIPPAEAARLAKSLPNCKAVDIGPGLNLLQEDNPDLIGSEIARWLSTLEISGGSGGSGGGGSGGMVFTLEDFVGDWEQTAAYNLDQVLEQGGVSSLLQNLAVSVTPIQRIVRSGENALKIDIHVIIPYEGLSADQMAQIEEVFKVVYPVDDHHFKVILPYGTLVIDGVTPNMLNYFGRPYEGIAVFDGKKITVTGTLWNGNKIIDERLITPDGSMLFRVTINSGSGHHHHHH

SEQ ID NO: 4034 - protein, 457 aa, Synthetic construct
MFHYVDEGPRDGTPVLFLHGNPTSSYVWRNIIPHVAPTHRCIAPDLIGMGKSDKPDLGYFFDDHVRFVDAFIEALGLEEVVLVIHDWGSALGFHWAKRNPERVKGIAFMEFIRPIPTWDEWPEFARETFQAFRTTDVGRKLIIDQNVFIEGTLPMGVVRPLTEVEMDHYREPFLNPEDREPLWRFPNELPIAGEPANIVALVEEYMDWLHQSPVPKLLFFGTPGVLIPPAEAARLAKSLPNCKAVDIGPGLNLLQEDNPDLIGSEIARWLKTLEISGGSGGSGGGGSGGMVFTLEDFVGDWEQTAAYNLDQVLEQGGVSSLLQNLAVSVTPIQRIVRSGENALKIDIHVIIPYEGLSADQMAQIEEVFKVVYPVDDHHFKVILPYGTLVIDGVTPNMLNYFGRPYEGIAVFDGKKITVTGTLWNGNKIIDERLITPDGSMLFRVTINSGSGHHHHHH

SEQ ID NO: 4035 - protein, 457 aa, Synthetic construct
MFHYVDVGPRDGTPVLFLHGNPTSSYVWRNIIPHVAPTHRCIAPDLIGFGKSGKPDLGYFFDDHVRFVDAFIEALGLEEVVLVIHDWGSALGFHWAKRNPERVKGIAFMEFIRPIPTWDEWPEFARETFQRFRTTDVGRKLIIDQNVFIEGTLPMGVVRPLTEVEMDHYREPFLNPVDREPLWRFPNELPIAGEPANIVALVEEYMDWLHQSPVPKLLFWGTPGVLIPPAEAARLAKSLPNCKAVDIGPGLNLLQEDNPDLIGSEIARWLKTLEISGGSGGSGGGGSGGMVFTLEDFVGDWEQTAAYNLDQVLEQGGVSSLLQNLAVSVTPIQRIVRSGENALKIDIHVIIPYEGLSADQMAQIEEVFKVVYPVDDHHFKVILPYGTLVIDGVTPNMLNYFGRPYEGIAVFDGKKITVTGTLWNGNKIIDERLITPDGSMLFRVTINSGSGHHHHHH

SEQ ID NO: 4036 - protein, 457 aa, Synthetic construct
MFHYVDVGPRDGTPVLFLHGNPTSSYVWRNIIPHVAPTHRCIAPDLIGMGKSDKPDLGYFFDDHVRFVDAFIEALGLEEVVLVIHDWGSALGFHWAKRNPERVKGIAFMEFIRPIPTWDEWPEFARETFQAFRTTDVGRKLIIDQNVFIEGTLPMGVVRPLTEVEMDHYREPFLNPVDREPLWRFPNELPIAGEPANIVKLVEEYMDWLHQSPVPKLLFFGTPGVLIPPAEAARLAKSLPNCKAVDIGPGLNLLQEDNPDLIGSEIARWLKTLEISGGSGGSGGGGSGGMVFTLEDFVGDWEQTAAYNLDQVLEQGGVSSLLQNLAVSVTPIQRIVRSGENALKIDIHVIIPYEGLSADQMAQIEEVFKVVYPVDDHHFKVILPYGTLVIDGVTPNMLNYFGRPYEGIAVFDGKKITVTGTLWNGNKIIDERLITPDGSMLFRVTINSGSGHHHHHH

SEQ ID NO: 4037 - protein, 457 aa, Synthetic construct
MFHYVDEGPRDGTPVLFLHGNPTSSYVWRNIIPHVAPTHRCIAPDLIGMGKSDKPDLGYFFDDHVRFMDAFIEALGLEEVVLVIHDWGSALGFHWAKRNPERVKGIAFMEFIRPIPTWDEWPEFARETFQAFRTTDVGRKLIIDQNVFIEGTLPMGVVRPLTEVEMDHYREPFLNPVDREPLWRFPNELPIAGEPANIVALVEEYMDWLHQSPVPKLLFWGTPGVLIPPAEAARLAKSLPNCKAVDIGPGLNLLQEDNPDLIGSEIARWLSTLEISGGSGGSGGGGSGGMVFTLEDFVGDWEQTAAYNLDQVLEQGGVSSLLQNLAVSVTPIQRIVRSGENALKIDIHVIIPYEGLSADQMAQIEEVFKVVYPVDDHHFKVILPYGTLVIDGVTPNMLNYFGRPYEGIAVFDGKKITVTGTLWNGNKIIDERLITPDGSMLFRVTINSGSGHHHHHH

SEQ ID NO: 4038 - protein, 457 aa, Synthetic construct
MFHYVDEGPRDGTPVLFLHGNPTSSYVWRNIIPHVAPTHRCIAPDLIGFGKSGKPDLGYFFDDHVRFMDAFIEALGLEEVVLVIHDWGSALGFHWAKRNPERVKGIAFMEFIRPIPDWDEWPEFARETFQAFRTTDVGRKLIIDQNVFIEGTLPMGVVRPLTEVEMDHYREPFLNPEDREPLWRFPNELPIAGEPANIVKLVEEYMDWLHQSPVPKLLFWGTPGVLIPPAEAARLAKSLPNCKAVDIGPGLNLLQEDNPDLIGSEIARWLSTLEISGGSGGSGGGGSGGMVFTLEDFVGDWEQTAAYNLDQVLEQGGVSSLLQNLAVSVTPIQRIVRSGENALKIDIHVIIPYEGLSADQMAQIEEVFKVVYPVDDHHFKVILPYGTLVIDGVTPNMLNYFGRPYEGIAVFDGKKITVTGTLWNGNKIIDERLITPDGSMLFRVTINSGSGHHHHHH

SEQ ID NO: 4039 - protein, 457 aa, Synthetic construct
MFHYVDEGPRDGTPVLFLHGNPTSSYVWRNIIPHVAPTHRCIAPDLIGMGKSDKPDLGYFFDDHVRFVDAFIEALGLEEVVLVIHDWGSALGFHWAKRNPERVKGIAFMEFIRPIPDWDEWPEFARETFQAFRTTDVGRKLIIDQNVFIEGTLPMGVVRPLTEVEMDHYREPFLNPEDREPLWRFPNELPIAGEPANIVKLVEEYMDWLHQSPVPKLLFWGTPGVLIPPAEAARLAKSLPNCKAVDIGPGLNLLQEDNPDLIGSEIARWLKTLEISGGSGGSGGGGSGGMVFTLEDFVGDWEQTAAYNLDQVLEQGGVSSLLQNLAVSVTPIQRIVRSGENALKIDIHVIIPYEGLSADQMAQIEEVFKVVYPVDDHHFKVILPYGTLVIDGVTPNMLNYFGRPYEGIAVFDGKKITVTGTLWNGNKIIDERLITPDGSMLFRVTINSGSGHHHHHH

SEQ ID NO: 4040 - protein, 457 aa, Synthetic construct
MFHYVDVGPRDGTPVLFLHGNPTSSYVWRNIIPHVAPTHRCIAPDLIGMGKSDKPDLGYFFDDHVRFVDAFIEALGLEEVVLVIHDWGSALGFHWAKRNPERVKGIAFMEFIRPIPDWDEWPEFARETFQRFRTTDVGRKLIIDQNVFIEGTLPMGVVRPLTEVEMDHYREPFLNPVDREPLWRFPNELPIAGEPANIVALVEEYMDWLHQSPVPKLLFWGTPGVLIPPAEAARLAKSLPNCKAVDIGPGLNLLQEDNPDLIGSEIARWLSTLEISGGSGGSGGGGSGGMVFTLEDFVGDWEQTAAYNLDQVLEQGGVSSLLQNLAVSVTPIQRIVRSGENALKIDIHVIIPYEGLSADQMAQIEEVFKVVYPVDDHHFKVILPYGTLVIDGVTPNMLNYFGRPYEGIAVFDGKKITVTGTLWNGNKIIDERLITPDGSMLFRVTINSGSGHHHHHH

SEQ ID NO: 4041 - protein, 457 aa, Synthetic construct
MFHYVDVGPRDGTPVLFLHGNPTSSYVWRNIIPHVAPTHRCIAPDLIGMGKSDKPDLGYFFDDHVRFVDAFIEALGLEEVVLVIHDWGSALGFHWAKRNPERVKGIAFMEFIRPIPDWDEWPEFARETFQAFRTTDVGRKLIIDQNVFIEGTLPMGVVRPLTEVEMDHYREPFLNPVDREPLWRFPNELPIAGEPANIVALVEEYMDWLHQSPVPKLLFFGTPGVLIPPAEAARLAKSLPNCKAVDIGPGLNLLQEDNPDLIGSEIARWLSTLEISGGSGGSGGGGSGGMVFTLEDFVGDWEQTAAYNLDQVLEQGGVSSLLQNLAVSVTPIQRIVRSGENALKIDIHVIIPYEGLSADQMAQIEEVFKVVYPVDDHHFKVILPYGTLVIDGVTPNMLNYFGRPYEGIAVFDGKKITVTGTLWNGNKIIDERLITPDGSMLFRVTINSGSGHHHHHH

SEQ ID NO: 4042 - protein, 457 aa, Synthetic construct
MFHYVDVGPRDGTPVLFLHGNPTSSYVWRNIIPHVAPTHRCIAPDLIGMGKSDKPDLGYFFDDHVRFMDAFIEALGLEEVVLVIHDWGSALGFHWAKRNPERVKGIAFMEFIRPIPTWDEWPEFARETFQAFRTTDVGRKLIIDQNVFIEGTLPMGVVRPLTEVEMDHYREPFLNPEDREPLWRFPNELPIAGEPANIVKLVEEYMDWLHQSPVPKLLFWGTPGVLIPPAEAARLAKSLPNCKAVDIGPGLNLLQEDNPDLIGSEIARWLSTLEISGGSGGSGGGGSGGMVFTLEDFVGDWEQTAAYNLDQVLEQGGVSSLLQNLAVSVTPIQRIVRSGENALKIDIHVIIPYEGLSADQMAQIEEVFKVVYPVDDHHFKVILPYGTLVIDGVTPNMLNYFGRPYEGIAVFDGKKITVTGTLWNGNKIIDERLITPDGSMLFRVTINSGSGHHHHHH

SEQ ID NO: 4043 - protein, 457 aa, Synthetic construct
MFHYVDVGPRDGTPVLFLHGNPTSSYVWRNIIPHVAPTHRCIAPDLIGMGKSDKPDLGYFFDDHVRFVDAFIEALGLEEVVLVIHDWGSALGFHWAKRNPERVKGIAFMEFIRPIPDWDEWPEFARETFQRFRTTDVGRKLIIDQNVFIEGTLPMGVVRPLTEVEMDHYREPFLNPVDREPLWRFPNELPIAGEPANIVKLVEEYMDWLHQSPVPKLLFFGTPGVLIPPAEAARLAKSLPNCKAVDIGPGLNLLQEDNPDLIGSEIARWLKTLEISGGSGGSGGGGSGGMVFTLEDFVGDWEQTAAYNLDQVLEQGGVSSLLQNLAVSVTPIQRIVRSGENALKIDIHVIIPYEGLSADQMAQIEEVFKVVYPVDDHHFKVILPYGTLVIDGVTPNMLNYFGRPYEGIAVFDGKKITVTGTLWNGNKIIDERLITPDGSMLFRVTINSGSGHHHHHH

SEQ ID NO: 4044 - protein, 457 aa, Synthetic construct
MFHYVDEGPRDGTPVLFLHGNPTSSYVWRNIIPHVAPTHRCIAPDLIGFGKSGKPDLGYFFDDHVRFMDAFIEALGLEEVVLVIHDWGSALGFHWAKRNPERVKGIAFMEFIRPIPDWDEWPEFARETFQRFRTTDVGRKLIIDQNVFIEGTLPMGVVRPLTEVEMDHYREPFLNPVDREPLWRFPNELPIAGEPANIVKLVEEYMDWLHQSPVPKLLFFGTPGVLIPPAEAARLAKSLPNCKAVDIGPGLNLLQEDNPDLIGSEIARWLSTLEISGGSGGSGGGGSGGMVFTLEDFVGDWEQTAAYNLDQVLEQGGVSSLLQNLAVSVTPIQRIVRSGENALKIDIHVIIPYEGLSADQMAQIEEVFKVVYPVDDHHFKVILPYGTLVIDGVTPNMLNYFGRPYEGIAVFDGKKITVTGTLWNGNKIIDERLITPDGSMLFRVTINSGSGHHHHHH

SEQ ID NO: 4045 - protein, 457 aa, Synthetic construct
MFHYVDEGPRDGTPVLFLHGNPTSSYVWRNIIPHVAPTHRCIAPDLIGFGKSGKPDLGYFFDDHVRFVDAFIEALGLEEVVLVIHDWGSALGFHWAKRNPERVKGIAFMEFIRPIPTWDEWPEFARETFQRFRTTDVGRKLIIDQNVFIEGTLPMGVVRPLTEVEMDHYREPFLNPEDREPLWRFPNELPIAGEPANIVALVEEYMDWLHQSPVPKLLFFGTPGVLIPPAEAARLAKSLPNCKAVDIGPGLNLLQEDNPDLIGSEIARWLSTLEISGGSGGSGGGGSGGMVFTLEDFVGDWEQTAAYNLDQVLEQGGVSSLLQNLAVSVTPIQRIVRSGENALKIDIHVIIPYEGLSADQMAQIEEVFKVVYPVDDHHFKVILPYGTLVIDGVTPNMLNYFGRPYEGIAVFDGKKITVTGTLWNGNKIIDERLITPDGSMLFRVTINSGSGHHHHHH

SEQ ID NO: 4046 - protein, 457 aa, Synthetic construct
MFHYVDVGPRDGTPVLFLHGNPTSSYVWRNIIPHVAPTHRCIAPDLIGMGKSDKPDLGYFFDDHVRFVDAFIEALGLEEVVLVIHDWGSALGFHWAKRNPERVKGIAFMEFIRPIPDWDEWPEFARETFQRFRTTDVGRKLIIDQNVFIEGTLPMGVVRPLTEVEMDHYREPFLNPVDREPLWRFPNELPIAGEPANIVALVEEYMDWLHQSPVPKLLFFGTPGVLIPPAEAARLAKSLPNCKAVDIGPGLNLLQEDNPDLIGSEIARWLSTLEISGGSGGSGGGGSGGMVFTLEDFVGDWEQTAAYNLDQVLEQGGVSSLLQNLAVSVTPIQRIVRSGENALKIDIHVIIPYEGLSADQMAQIEEVFKVVYPVDDHHFKVILPYGTLVIDGVTPNMLNYFGRPYEGIAVFDGKKITVTGTLWNGNKIIDERLITPDGSMLFRVTINSGSGHHHHHH

SEQ ID NO: 4047 - protein, 457 aa, Synthetic construct
MFHYVDVGPRDGTPVLFLHGNPTSSYVWRNIIPHVAPTHRCIAPDLIGMGKSDKPDLGYFFDDHVRFMDAFIEALGLEEVVLVIHDWGSALGFHWAKRNPERVKGIAFMEFIRPIPDWDEWPEFARETFQRFRTTDVGRKLIIDQNVFIEGTLPMGVVRPLTEVEMDHYREPFLNPEDREPLWRFPNELPIAGEPANIVALVEEYMDWLHQSPVPKLLFFGTPGVLIPPAEAARLAKSLPNCKAVDIGPGLNLLQEDNPDLIGSEIARWLKTLEISGGSGGSGGGGSGGMVFTLEDFVGDWEQTAAYNLDQVLEQGGVSSLLQNLAVSVTPIQRIVRSGENALKIDIHVIIPYEGLSADQMAQIEEVFKVVYPVDDHHFKVILPYGTLVIDGVTPNMLNYFGRPYEGIAVFDGKKITVTGTLWNGNKIIDERLITPDGSMLFRVTINSGSGHHHHHH

SEQ ID NO: 4048 - protein, 457 aa, Synthetic construct
MFHYVDVGPRDGTPVLFLHGNPTSSYVWRNIIPHVAPTHRCIAPDLIGFGKSGKPDLGYFFDDHVRFMDAFIEALGLEEVVLVIHDWGSALGFHWAKRNPERVKGIAFMEFIRPIPTWDEWPEFARETFQRFRTTDVGRKLIIDQNVFIEGTLPMGVVRPLTEVEMDHYREPFLNPVDREPLWRFPNELPIAGEPANIVALVEEYMDWLHQSPVPKLLFWGTPGVLIPPAEAARLAKSLPNCKAVDIGPGLNLLQEDNPDLIGSEIARWLSTLEISGGSGGSGGGGSGGMVFTLEDFVGDWEQTAAYNLDQVLEQGGVSSLLQNLAVSVTPIQRIVRSGENALKIDIHVIIPYEGLSADQMAQIEEVFKVVYPVDDHHFKVILPYGTLVIDGVTPNMLNYFGRPYEGIAVFDGKKITVTGTLWNGNKIIDERLITPDGSMLFRVTINSGSGHHHHHH

SEQ ID NO: 4049 - protein, 457 aa, Synthetic construct
MFHYVDEGPRDGTPVLFLHGNPTSSYVWRNIIPHVAPTHRCIAPDLIGFGKSGKPDLGYFFDDHVRFMDAFIEALGLEEVVLVIHDWGSALGFHWAKRNPERVKGIAFMEFIRPIPTWDEWPEFARETFQRFRTTDVGRKLIIDQNVFIEGTLPMGVVRPLTEVEMDHYREPFLNPEDREPLWRFPNELPIAGEPANIVALVEEYMDWLHQSPVPKLLFWGTPGVLIPPAEAARLAKSLPNCKAVDIGPGLNLLQEDNPDLIGSEIARWLKTLEISGGSGGSGGGGSGGMVFTLEDFVGDWEQTAAYNLDQVLEQGGVSSLLQNLAVSVTPIQRIVRSGENALKIDIHVIIPYEGLSADQMAQIEEVFKVVYPVDDHHFKVILPYGTLVIDGVTPNMLNYFGRPYEGIAVFDGKKITVTGTLWNGNKIIDERLITPDGSMLFRVTINSGSGHHHHHH

SEQ ID NO: 4050 - protein, 457 aa, Synthetic construct
MFHYVDEGPRDGTPVLFLHGNPTSSYVWRNIIPHVAPTHRCIAPDLIGMGKSDKPDLGYFFDDHVRFMDAFIEALGLEEVVLVIHDWGSALGFHWAKRNPERVKGIAFMEFIRPIPDWDEWPEFARETFQRFRTTDVGRKLIIDQNVFIEGTLPMGVVRPLTEVEMDHYREPFLNPEDREPLWRFPNELPIAGEPANIVALVEEYMDWLHQSPVPKLLFWGTPGVLIPPAEAARLAKSLPNCKAVDIGPGLNLLQEDNPDLIGSEIARWLSTLEISGGSGGSGGGGSGGMVFTLEDFVGDWEQTAAYNLDQVLEQGGVSSLLQNLAVSVTPIQRIVRSGENALKIDIHVIIPYEGLSADQMAQIEEVFKVVYPVDDHHFKVILPYGTLVIDGVTPNMLNYFGRPYEGIAVFDGKKITVTGTLWNGNKIIDERLITPDGSMLFRVTINSGSGHHHHHH

SEQ ID NO: 4051 - protein, 457 aa, Synthetic construct
MFHYVDVGPRDGTPVLFLHGNPTSSYVWRNIIPHVAPTHRCIAPDLIGMGKSDKPDLGYFFDDHVRFVDAFIEALGLEEVVLVIHDWGSALGFHWAKRNPERVKGIAFMEFIRPIPTWDEWPEFARETFQAFRTTDVGRKLIIDQNVFIEGTLPMGVVRPLTEVEMDHYREPFLNPEDREPLWRFPNELPIAGEPANIVALVEEYMDWLHQSPVPKLLFFGTPGVLIPPAEAARLAKSLPNCKAVDIGPGLNLLQEDNPDLIGSEIARWLKTLEISGGSGGSGGGGSGGMVFTLEDFVGDWEQTAAYNLDQVLEQGGVSSLLQNLAVSVTPIQRIVRSGENALKIDIHVIIPYEGLSADQMAQIEEVFKVVYPVDDHHFKVILPYGTLVIDGVTPNMLNYFGRPYEGIAVFDGKKITVTGTLWNGNKIIDERLITPDGSMLFRVTINSGSGHHHHHH

SEQ ID NO: 4052 - protein, 457 aa, Synthetic construct
MFHYVDVGPRDGTPVLFLHGNPTSSYVWRNIIPHVAPTHRCIAPDLIGFGKSGKPDLGYFFDDHVRFMDAFIEALGLEEVVLVIHDWGSALGFHWAKRNPERVKGIAFMEFIRPIPDWDEWPEFARETFQRFRTTDVGRKLIIDQNVFIEGTLPMGVVRPLTEVEMDHYREPFLNPVDREPLWRFPNELPIAGEPANIVKLVEEYMDWLHQSPVPKLLFFGTPGVLIPPAEAARLAKSLPNCKAVDIGPGLNLLQEDNPDLIGSEIARWLKTLEISGGSGGSGGGGSGGMVFTLEDFVGDWEQTAAYNLDQVLEQGGVSSLLQNLAVSVTPIQRIVRSGENALKIDIHVIIPYEGLSADQMAQIEEVFKVVYPVDDHHFKVILPYGTLVIDGVTPNMLNYFGRPYEGIAVFDGKKITVTGTLWNGNKIIDERLITPDGSMLFRVTINSGSGHHHHHH

SEQ ID NO: 4053 - protein, 457 aa, Synthetic construct
MFHYVDEGPRDGTPVLFLHGNPTSSYVWRNIIPHVAPTHRCIAPDLIGMGKSDKPDLGYFFDDHVRFVDAFIEALGLEEVVLVIHDWGSALGFHWAKRNPERVKGIAFMEFIRPIPDWDEWPEFARETFQAFRTTDVGRKLIIDQNVFIEGTLPMGVVRPLTEVEMDHYREPFLNPVDREPLWRFPNELPIAGEPANIVALVEEYMDWLHQSPVPKLLFFGTPGVLIPPAEAARLAKSLPNCKAVDIGPGLNLLQEDNPDLIGSEIARWLSTLEISGGSGGSGGGGSGGMVFTLEDFVGDWEQTAAYNLDQVLEQGGVSSLLQNLAVSVTPIQRIVRSGENALKIDIHVIIPYEGLSADQMAQIEEVFKVVYPVDDHHFKVILPYGTLVIDGVTPNMLNYFGRPYEGIAVFDGKKITVTGTLWNGNKIIDERLITPDGSMLFRVTINSGSGHHHHHH

SEQ ID NO: 4054 - protein, 457 aa, Synthetic construct
MFHYVDVGPRDGTPVLFLHGNPTSSYVWRNIIPHVAPTHRCIAPDLIGMGKSDKPDLGYFFDDHVRFMDAFIEALGLEEVVLVIHDWGSALGFHWAKRNPERVKGIAFMEFIRPIPDWDEWPEFARETFQAFRTTDVGRKLIIDQNVFIEGTLPMGVVRPLTEVEMDHYREPFLNPVDREPLWRFPNELPIAGEPANIVKLVEEYMDWLHQSPVPKLLFWGTPGVLIPPAEAARLAKSLPNCKAVDIGPGLNLLQEDNPDLIGSEIARWLSTLEISGGSGGSGGGGSGGMVFTLEDFVGDWEQTAAYNLDQVLEQGGVSSLLQNLAVSVTPIQRIVRSGENALKIDIHVIIPYEGLSADQMAQIEEVFKVVYPVDDHHFKVILPYGTLVIDGVTPNMLNYFGRPYEGIAVFDGKKITVTGTLWNGNKIIDERLITPDGSMLFRVTINSGSGHHHHHH

SEQ ID NO: 4055 - protein, 457 aa, Synthetic construct
MFHYVDVGPRDGTPVLFLHGNPTSSYVWRNIIPHVAPTHRCIAPDLIGMGKSDKPDLGYFFDDHVRFVDAFIEALGLEEVVLVIHDWGSALGFHWAKRNPERVKGIAFMEFIRPIPDWDEWPEFARETFQRFRTTDVGRKLIIDQNVFIEGTLPMGVVRPLTEVEMDHYREPFLNPEDREPLWRFPNELPIAGEPANIVKLVEEYMDWLHQSPVPKLLFFGTPGVLIPPAEAARLAKSLPNCKAVDIGPGLNLLQEDNPDLIGSEIARWLSTLEISGGSGGSGGGGSGGMVFTLEDFVGDWEQTAAYNLDQVLEQGGVSSLLQNLAVSVTPIQRIVRSGENALKIDIHVIIPYEGLSADQMAQIEEVFKVVYPVDDHHFKVILPYGTLVIDGVTPNMLNYFGRPYEGIAVFDGKKITVTGTLWNGNKIIDERLITPDGSMLFRVTINSGSGHHHHHH

SEQ ID NO: 4056 - protein, 457 aa, Synthetic construct
MFHYVDEGPRDGTPVLFLHGNPTSSYVWRNIIPHVAPTHRCIAPDLIGMGKSDKPDLGYFFDDHVRFMDAFIEALGLEEVVLVIHDWGSALGFHWAKRNPERVKGIAFMEFIRPIPTWDEWPEFARETFQRFRTTDVGRKLIIDQNVFIEGTLPMGVVRPLTEVEMDHYREPFLNPVDREPLWRFPNELPIAGEPANIVALVEEYMDWLHQSPVPKLLFWGTPGVLIPPAEAARLAKSLPNCKAVDIGPGLNLLQEDNPDLIGSEIARWLSTLEISGGSGGSGGGGSGGMVFTLEDFVGDWEQTAAYNLDQVLEQGGVSSLLQNLAVSVTPIQRIVRSGENALKIDIHVIIPYEGLSADQMAQIEEVFKVVYPVDDHHFKVILPYGTLVIDGVTPNMLNYFGRPYEGIAVFDGKKITVTGTLWNGNKIIDERLITPDGSMLFRVTINSGSGHHHHHH

SEQ ID NO: 4057 - protein, 457 aa, Synthetic construct
MFHYVDVGPRDGTPVLFLHGNPTSSYVWRNIIPHVAPTHRCIAPDLIGMGKSDKPDLGYFFDDHVRFMDAFIEALGLEEVVLVIHDWGSALGFHWAKRNPERVKGIAFMEFIRPIPDWDEWPEFARETFQAFRTTDVGRKLIIDQNVFIEGTLPMGVVRPLTEVEMDHYREPFLNPVDREPLWRFPNELPIAGEPANIVALVEEYMDWLHQSPVPKLLFWGTPGVLIPPAEAARLAKSLPNCKAVDIGPGLNLLQEDNPDLIGSEIARWLKTLEISGGSGGSGGGGSGGMVFTLEDFVGDWEQTAAYNLDQVLEQGGVSSLLQNLAVSVTPIQRIVRSGENALKIDIHVIIPYEGLSADQMAQIEEVFKVVYPVDDHHFKVILPYGTLVIDGVTPNMLNYFGRPYEGIAVFDGKKITVTGTLWNGNKIIDERLITPDGSMLFRVTINSGSGHHHHHH

SEQ ID NO: 4058 - protein, 457 aa, Synthetic construct
MFHYVDEGPRDGTPVLFLHGNPTSSYVWRNIIPHVAPTHRCIAPDLIGFGKSGKPDLGYFFDDHVRFMDAFIEALGLEEVVLVIHDWGSALGFHWAKRNPERVKGIAFMEFIRPIPTWDEWPEFARETFQAFRTTDVGRKLIIDQNVFIEGTLPMGVVRPLTEVEMDHYREPFLNPEDREPLWRFPNELPIAGEPANIVKLVEEYMDWLHQSPVPKLLFWGTPGVLIPPAEAARLAKSLPNCKAVDIGPGLNLLQEDNPDLIGSEIARWLSTLEISGGSGGSGGGGSGGMVFTLEDFVGDWEQTAAYNLDQVLEQGGVSSLLQNLAVSVTPIQRIVRSGENALKIDIHVIIPYEGLSADQMAQIEEVFKVVYPVDDHHFKVILPYGTLVIDGVTPNMLNYFGRPYEGIAVFDGKKITVTGTLWNGNKIIDERLITPDGSMLFRVTINSGSGHHHHHH

SEQ ID NO: 4059 - protein, 457 aa, Synthetic construct
MFHYVDVGPRDGTPVLFLHGNPTSSYVWRNIIPHVAPTHRCIAPDLIGFGKSGKPDLGYFFDDHVRFVDAFIEALGLEEVVLVIHDWGSALGFHWAKRNPERVKGIAFMEFIRPIPTWDEWPEFARETFQRFRTTDVGRKLIIDQNVFIEGTLPMGVVRPLTEVEMDHYREPFLNPVDREPLWRFPNELPIAGEPANIVKLVEEYMDWLHQSPVPKLLFFGTPGVLIPPAEAARLAKSLPNCKAVDIGPGLNLLQEDNPDLIGSEIARWLKTLEISGGSGGSGGGGSGGMVFTLEDFVGDWEQTAAYNLDQVLEQGGVSSLLQNLAVSVTPIQRIVRSGENALKIDIHVIIPYEGLSADQMAQIEEVFKVVYPVDDHHFKVILPYGTLVIDGVTPNMLNYFGRPYEGIAVFDGKKITVTGTLWNGNKIIDERLITPDGSMLFRVTINSGSGHHHHHH

SEQ ID NO: 4060 - protein, 457 aa, Synthetic construct
MFHYVDEGPRDGTPVLFLHGNPTSSYVWRNIIPHVAPTHRCIAPDLIGMGKSDKPDLGYFFDDHVRFVDAFIEALGLEEVVLVIHDWGSALGFHWAKRNPERVKGIAFMEFIRPIPTWDEWPEFARETFQAFRTTDVGRKLIIDQNVFIEGTLPMGVVRPLTEVEMDHYREPFLNPVDREPLWRFPNELPIAGEPANIVKLVEEYMDWLHQSPVPKLLFFGTPGVLIPPAEAARLAKSLPNCKAVDIGPGLNLLQEDNPDLIGSEIARWLKTLEISGGSGGSGGGGSGGMVFTLEDFVGDWEQTAAYNLDQVLEQGGVSSLLQNLAVSVTPIQRIVRSGENALKIDIHVIIPYEGLSADQMAQIEEVFKVVYPVDDHHFKVILPYGTLVIDGVTPNMLNYFGRPYEGIAVFDGKKITVTGTLWNGNKIIDERLITPDGSMLFRVTINSGSGHHHHHH

SEQ ID NO: 4061 - protein, 457 aa, Synthetic construct
MFHYVDEGPRDGTPVLFLHGNPTSSYVWRNIIPHVAPTHRCIAPDLIGMGKSDKPDLGYFFDDHVRFVDAFIEALGLEEVVLVIHDWGSALGFHWAKRNPERVKGIAFMEFIRPIPTWDEWPEFARETFQRFRTTDVGRKLIIDQNVFIEGTLPMGVVRPLTEVEMDHYREPFLNPVDREPLWRFPNELPIAGEPANIVKLVEEYMDWLHQSPVPKLLFWGTPGVLIPPAEAARLAKSLPNCKAVDIGPGLNLLQEDNPDLIGSEIARWLKTLEISGGSGGSGGGGSGGMVFTLEDFVGDWEQTAAYNLDQVLEQGGVSSLLQNLAVSVTPIQRIVRSGENALKIDIHVIIPYEGLSADQMAQIEEVFKVVYPVDDHHFKVILPYGTLVIDGVTPNMLNYFGRPYEGIAVFDGKKITVTGTLWNGNKIIDERLITPDGSMLFRVTINSGSGHHHHHH

SEQ ID NO: 4062 - protein, 457 aa, Synthetic construct
MFHYVDVGPRDGTPVLFLHGNPTSSYVWRNIIPHVAPTHRCIAPDLIGFGKSGKPDLGYFFDDHVRFMDAFIEALGLEEVVLVIHDWGSALGFHWAKRNPERVKGIAFMEFIRPIPDWDEWPEFARETFQAFRTTDVGRKLIIDQNVFIEGTLPMGVVRPLTEVEMDHYREPFLNPEDREPLWRFPNELPIAGEPANIVKLVEEYMDWLHQSPVPKLLFFGTPGVLIPPAEAARLAKSLPNCKAVDIGPGLNLLQEDNPDLIGSEIARWLSTLEISGGSGGSGGGGSGGMVFTLEDFVGDWEQTAAYNLDQVLEQGGVSSLLQNLAVSVTPIQRIVRSGENALKIDIHVIIPYEGLSADQMAQIEEVFKVVYPVDDHHFKVILPYGTLVIDGVTPNMLNYFGRPYEGIAVFDGKKITVTGTLWNGNKIIDERLITPDGSMLFRVTINSGSGHHHHHH

SEQ ID NO: 4063 - protein, 457 aa, Synthetic construct
MFHYVDVGPRDGTPVLFLHGNPTSSYVWRNIIPHVAPTHRCIAPDLIGMGKSDKPDLGYFFDDHVRFMDAFIEALGLEEVVLVIHDWGSALGFHWAKRNPERVKGIAFMEFIRPIPTWDEWPEFARETFQAFRTTDVGRKLIIDQNVFIEGTLPMGVVRPLTEVEMDHYREPFLNPEDREPLWRFPNELPIAGEPANIVALVEEYMDWLHQSPVPKLLFFGTPGVLIPPAEAARLAKSLPNCKAVDIGPGLNLLQEDNPDLIGSEIARWLKTLEISGGSGGSGGGGSGGMVFTLEDFVGDWEQTAAYNLDQVLEQGGVSSLLQNLAVSVTPIQRIVRSGENALKIDIHVIIPYEGLSADQMAQIEEVFKVVYPVDDHHFKVILPYGTLVIDGVTPNMLNYFGRPYEGIAVFDGKKITVTGTLWNGNKIIDERLITPDGSMLFRVTINSGSGHHHHHH

SEQ ID NO: 4064 - protein, 457 aa, Synthetic construct
MFHYVDVGPRDGTPVLFLHGNPTSSYVWRNIIPHVAPTHRCIAPDLIGMGKSDKPDLGYFFDDHVRFVDAFIEALGLEEVVLVIHDWGSALGFHWAKRNPERVKGIAFMEFIRPIPTWDEWPEFARETFQAFRTTDVGRKLIIDQNVFIEGTLPMGVVRPLTEVEMDHYREPFLNPVDREPLWRFPNELPIAGEPANIVKLVEEYMDWLHQSPVPKLLFWGTPGVLIPPAEAARLAKSLPNCKAVDIGPGLNLLQEDNPDLIGSEIARWLSTLEISGGSGGSGGGGSGGMVFTLEDFVGDWEQTAAYNLDQVLEQGGVSSLLQNLAVSVTPIQRIVRSGENALKIDIHVIIPYEGLSADQMAQIEEVFKVVYPVDDHHFKVILPYGTLVIDGVTPNMLNYFGRPYEGIAVFDGKKITVTGTLWNGNKIIDERLITPDGSMLFRVTINSGSGHHHHHH

SEQ ID NO: 4065 - protein, 136 aa, Synthetic construct
MGVQVETISPGDGRTFPKRGQTCVVHYTGMLEDGKKFDSSRDRNKPFKFMLGKQEVIRGWEEGVAQMSVGQRAKLTISPDYAYGATGHPGIIPPHATLVFDVELLKLEGGSGGGGSGGSSSGGAIVSGWRLFKKIS

SEQ ID NO: 4066 - protein, 304 aa, Synthetic construct
MKHHHHHHAEIGTGFPFDPHYVEVLGERMHYVDVGPRDGTPVLFLHGNPTSSYVWRNIIPHVAPTHRCIAPDLIGMGKSDKPDLGYFFDDHVRFMDAFIEALGLEEVVLVIHDWGSALGFHWAKRNPERVKGIAFMEFIRPIPTWDEWPEFARETFQAFRTTDVGRKLIIDQNVFIEGTLPMGVVRPLTEVEMDHYREPFLNPVDREPLWRFPNELPIAGEPANIVALVEEYMDWLHQSPVPKLLFWGTPGVLIPPAEAARLAKSLPNCKAVDIGPGLNLLQEDNPDLIGSEIARWLSTLEISG

SEQ ID NO: 4067 - protein, 152 aa, Synthetic construct
MKHHHHHHGSGMGVQVETISPGDGRTFPKRGQTCVVHYTGMLEDGKKFDSSRDRNKPFKFMLGKQEVIRGWEEGVAQMSVGQRAKLTISPDYAYGATGHPGIIPPHATLVFDVELLKLEGGSGGGGSGGSSSGGEIGTGFPFDPHYVEVLGS

SEQ ID NO: 4068 - protein, 169 aa, Synthetic construct
MKHHHHHHGSGMGVQVETISPGDGRTFPKRGQTCVVHYTGMLEDGKKFDSSRDRNKPFKFMLGKQEVIRGWEEGVAQMSVGQRAKLTISPDYAYGATGHPGIIPPHATLVFDVELLKLEGGSGGGGSGGSSSGGEIGTGFPFDPHYVEVLGGGSGGVSVSGWRLFKKIS

SEQ ID NO: 4069 - protein, 288 aa, Synthetic construct
MFHYVDVGPRDGTPVLFLHGNPTSSYVWRNIIPHVAPTHRCIAPDLIGMGKSDKPDLGYFFDDHVRFMDAFIEALGLEEVVLVIHDWGSALGFHWAKRNPERVKGIAFMEFIRPIPTWDEWPEFARETFQAFRTTDVGRKLIIDQNVFIEGTLPMGVVRPLTEVEMDHYREPFLNPVDREPLWRFPNELPIAGEPANIVALVEEYMDWLHQSPVPKLLFWGTPGVLIPPAEAARLAKSLPNCKAVDIGPGLNLLQEDNPDLIGSEIARWLSTLEISGGSGSGHHHHHH

SEQ ID NO: 4070 - protein, 448 aa, Synthetic construct
MFHYVDVGPRDGTPVLFLHGNPTSSYVWRNIIPHVAPTHRCIAPDLIGMGKSDKPDLGYFFDDHVRFMDAFIEALGLEEVVLVIHDWGSALGFHWAKRNPERVKGIAFMEFIRPIPTWDEWPEFARETFQAFRTTDVGRKLIIDQNVFIEGTLPMGVVRPLTEVEMDHYREPFLNPVDREPLWRFPNELPIAGEPANIVALVEEYMDWLHQSPVPKLLFWGTPGVLIPPAEAARLAKSLPNCKAVDIGPGLNLLQEDNPDLIGSEIARWLSTLEISGGSGGSGGGGSGGMVFTLEDFVGDWEQTAAYNLDQVLEQGGVSSLLQNLAVSVTPIQRIVRSGENALKIDIHVIIPYEGLSADQMAQIEEVFKVVYPVDDHHFKVILPYGTLVIDGVTPNMLNYFGRPYEGIAVFDGKKITVTGTLWNGNKIIDERLITPDGSMLFRVTINS

SEQ ID NO: 4071 - protein, 448 aa, Synthetic construct
MVFTLEDFVGDWEQTAAYNLDQVLEQGGVSSLLQNLAVSVTPIQRIVRSGENALKIDIHVIIPYEGLSADQMAQIEEVFKVVYPVDDHHFKVILPYGTLVIDGVTPNMLNYFGRPYEGIAVFDGKKITVTGTLWNGNKIIDERLITPDGSMLFRVTINSGGSGGGGSGGMFHYVDVGPRDGTPVLFLHGNPTSSYVWRNIIPHVAPTHRCIAPDLIGMGKSDKPDLGYFFDDHVRFMDAFIEALGLEEVVLVIHDWGSALGFHWAKRNPERVKGIAFMEFIRPIPTWDEWPEFARETFQAFRTTDVGRKLIIDQNVFIEGTLPMGVVRPLTEVEMDHYREPFLNPVDREPLWRFPNELPIAGEPANIVALVEEYMDWLHQSPVPKLLFWGTPGVLIPPAEAARLAKSLPNCKAVDIGPGLNLLQEDNPDLIGSEIARWLSTLEISGGS

SEQ ID NO: 4072 - protein, 448 aa, Synthetic construct; identical to SEQ ID NO: 3129

SEQ ID NO: 4073 - protein, 448 aa, Synthetic construct; identical to SEQ ID NO: 3131

SEQ ID NO: 4074 - protein, 448 aa, Synthetic construct; identical to SEQ ID NO: 3133

SEQ ID NO: 4075 - protein, 448 aa, Synthetic construct; identical to SEQ ID NO: 3145

SEQ ID NO: 4076 - protein, 448 aa, Synthetic construct; identical to SEQ ID NO: 3168

SEQ ID NO: 4077 - protein, 448 aa, Synthetic construct
MLHYVDVGPRDGTPVLFLHGNPTSSYVWRNIIPHVAPTHRCIAPDLIGMGKSDKPDLGYFFDDHVRFMDAFIEALGLEEVVLVIHDWGSALGFHWAKRNPERVKGIAFMEFIRPIPTWDEWPEFARETFQAFRTTDVGRKLIIDQNVFIEGTLPMGVVRPLTEVEMDHYREPFLNPVDREPLWRFPNELPIAGEPANIVALVEEYMDWLHQSPVPKLLFWGTPGVLIPPAEAARLAKSLPNCKAVDIGPGLNLLQEDNPDLIGSEIARWLSTLEISGGSGGSGGGGSGGMVFTLEDFVGDWEQTAAYNLDQVLEQGGVSSLLQNLAVSVTPIQRIVRSGENALKIDIHVIIPYEGLSADQMAQIEEVFKVVYPVDDHHFKVILPYGTLVIDGVTPNMLNYFGRPYEGIAVFDGKKITVTGTLWNGNKIIDERLITPDGSMLFRVTINS

SEQ ID NO: 4078 - protein, 448 aa, Synthetic construct
MFHYVDVGPRDGTPVLFLHGNPTSSYVWRNIIPHVAPTHRCIAPDLIGMGKSSKPDLGYFFDDHVRFMDAFIEALGLEEVVLVIHDWGSALGFHWAKRNPERVKGIAFMEFIRPIPTWDEWPEFARETFQAFRTTDVGRKLIIDQNVFIEGTLPMGVVRPLTEVEMDHYREPFLNPVDREPLWRFPNELPIAGEPANIVALVEEYMDWLHQSPVPKLLFWGTPGVLIPPAEAARLAKSLPNCKAVDIGPGLNLLQEDNPDLIGSEIARWLSTLEISGGSGGSGGGGSGGMVFTLEDFVGDWEQTAAYNLDQVLEQGGVSSLLQNLAVSVTPIQRIVRSGENALKIDIHVIIPYEGLSADQMAQIEEVFKVVYPVDDHHFKVILPYGTLVIDGVTPNMLNYFGRPYEGIAVFDGKKITVTGTLWNGNKIIDERLITPDGSMLFRVTINS

SEQ ID NO: 4079 - protein, 448 aa, Synthetic construct
MFHYVDVGPRDGTPVLFLHGNPTSSYVWRNIIPHVAPTHRCIAPDLIGMGKSDKPPLGYFFDDHVRFMDAFIEALGLEEVVLVIHDWGSALGFHWAKRNPERVKGIAFMEFIRPIPTWDEWPEFARETFQAFRTTDVGRKLIIDQNVFIEGTLPMGVVRPLTEVEMDHYREPFLNPVDREPLWRFPNELPIAGEPANIVALVEEYMDWLHQSPVPKLLFWGTPGVLIPPAEAARLAKSLPNCKAVDIGPGLNLLQEDNPDLIGSEIARWLSTLEISGGSGGSGGGGSGGMVFTLEDFVGDWEQTAAYNLDQVLEQGGVSSLLQNLAVSVTPIQRIVRSGENALKIDIHVIIPYEGLSADQMAQIEEVFKVVYPVDDHHFKVILPYGTLVIDGVTPNMLNYFGRPYEGIAVFDGKKITVTGTLWNGNKIIDERLITPDGSMLFRVTINS

SEQ ID NO: 4080 - protein, 448 aa, Synthetic construct
MFHYVDVGPRDGTPVLFLHGNPTSSYVWRNIIPHVAPTHRCIAPDLIGMGKSDKPDLGYFFDDHVRFMDAFIEALGLEKVVLVIHDWGSALGFHWAKRNPERVKGIAFMEFIRPIPTWDEWPEFARETFQAFRTTDVGRKLIIDQNVFIEGTLPMGVVRPLTEVEMDHYREPFLNPVDREPLWRFPNELPIAGEPANIVALVEEYMDWLHQSPVPKLLFWGTPGVLIPPAEAARLAKSLPNCKAVDIGPGLNLLQEDNPDLIGSEIARWLSTLEISGGSGGSGGGGSGGMVFTLEDFVGDWEQTAAYNLDQVLEQGGVSSLLQNLAVSVTPIQRIVRSGENALKIDIHVIIPYEGLSADQMAQIEEVFKVVYPVDDHHFKVILPYGTLVIDGVTPNMLNYFGRPYEGIAVFDGKKITVTGTLWNGNKIIDERLITPDGSMLFRVTINS

SEQ ID NO: 4081 - protein, 448 aa, Synthetic construct
MFHYVDVGPRDGTPVLFLHGNPTSSYVWRNIIPHVAPTHRCIAPDLIGMGKSDKPDLGYFFDDHVRFMDAFIEALGLEEVVLVIHDWGSALGLHWAKRNPERVKGIAFMEFIRPIPTWDEWPEFARETFQAFRTTDVGRKLIIDQNVFIEGTLPMGVVRPLTEVEMDHYREPFLNPVDREPLWRFPNELPIAGEPANIVALVEEYMDWLHQSPVPKLLFWGTPGVLIPPAEAARLAKSLPNCKAVDIGPGLNLLQEDNPDLIGSEIARWLSTLEISGGSGGSGGGGSGGMVFTLEDFVGDWEQTAAYNLDQVLEQGGVSSLLQNLAVSVTPIQRIVRSGENALKIDIHVIIPYEGLSADQMAQIEEVFKVVYPVDDHHFKVILPYGTLVIDGVTPNMLNYFGRPYEGIAVFDGKKITVTGTLWNGNKIIDERLITPDGSMLFRVTINS

SEQ ID NO: 4082 - protein, 448 aa, Synthetic construct
MFHYVDVGPRDGTPVLFLHGNPTSSYVWRNIIPHVAPTHRCIAPDLIGMGKSDKPDLGYFFDDHVRFMDAFIEALGLEEVVLVIHDWGSALGFHWAKRNPERVKGIAFMEFIRPIPTWDEWPEFAREMFQAFRTTDVGRKLIIDQNVFIEGTLPMGVVRPLTEVEMDHYREPFLNPVDREPLWRFPNELPIAGEPANIVALVEEYMDWLHQSPVPKLLFWGTPGVLIPPAEAARLAKSLPNCKAVDIGPGLNLLQEDNPDLIGSEIARWLSTLEISGGSGGSGGGGSGGMVFTLEDFVGDWEQTAAYNLDQVLEQGGVSSLLQNLAVSVTPIQRIVRSGENALKIDIHVIIPYEGLSADQMAQIEEVFKVVYPVDDHHFKVILPYGTLVIDGVTPNMLNYFGRPYEGIAVFDGKKITVTGTLWNGNKIIDERLITPDGSMLFRVTINS

SEQ ID NO: 4083 - protein, 448 aa, Synthetic construct
MFHYVDVGPRDGTPVLFLHGNPTSSYVWRNIIPHVAPTHRCIAPDLIGMGKSDKPDLGYFFDDHVRFMDAFIEALGLEEVVLVIHDWGSALGFHWAKRNPERVKGIAFMEFIRPIPTWDEWPEFARETFQQFRTTDVGRKLIIDQNVFIEGTLPMGVVRPLTEVEMDHYREPFLNPVDREPLWRFPNELPIAGEPANIVALVEEYMDWLHQSPVPKLLFWGTPGVLIPPAEAARLAKSLPNCKAVDIGPGLNLLQEDNPDLIGSEIARWLSTLEISGGSGGSGGGGSGGMVFTLEDFVGDWEQTAAYNLDQVLEQGGVSSLLQNLAVSVTPIQRIVRSGENALKIDIHVIIPYEGLSADQMAQIEEVFKVVYPVDDHHFKVILPYGTLVIDGVTPNMLNYFGRPYEGIAVFDGKKITVTGTLWNGNKIIDERLITPDGSMLFRVTINS

SEQ ID NO: 4084 - protein, 448 aa, Synthetic construct
MFHYVDVGPRDGTPVLFLHGNPTSSYVWRNIIPHVAPTHRCIAPDLIGMGKSDKPDLGYFFDDHVRFMDAFIEALGLEEVVLVIHDWGSALGFHWAKRNPERVKGIAFMEFIRPIPTWDEWPEFARETFQAFRTTDVGRKLIIDQNVMIEGTLPMGVVRPLTEVEMDHYREPFLNPVDREPLWRFPNELPIAGEPANIVALVEEYMDWLHQSPVPKLLFWGTPGVLIPPAEAARLAKSLPNCKAVDIGPGLNLLQEDNPDLIGSEIARWLSTLEISGGSGGSGGGGSGGMVFTLEDFVGDWEQTAAYNLDQVLEQGGVSSLLQNLAVSVTPIQRIVRSGENALKIDIHVIIPYEGLSADQMAQIEEVFKVVYPVDDHHFKVILPYGTLVIDGVTPNMLNYFGRPYEGIAVFDGKKITVTGTLWNGNKIIDERLITPDGSMLFRVTINS

SEQ ID NO: 4085 - protein, 448 aa, Synthetic construct
MFHYVDVGPRDGTPVLFLHGNPTSSYVWRNIIPHVAPTHRCIAPDLIGMGKSDKPDLGYFFDDHVRFMDAFIEALGLEEVVLVIHDWGSALGFHWAKRNPERVKGIAFMEFIRPIPTWDEWPEFARETFQAFRTTDVGRKLIIDQNVFIEGTLPMGVVRPLTEVEMDHYREPFLNPQDREPLWRFPNELPIAGEPANIVALVEEYMDWLHQSPVPKLLFWGTPGVLIPPAEAARLAKSLPNCKAVDIGPGLNLLQEDNPDLIGSEIARWLSTLEISGGSGGSGGGGSGGMVFTLEDFVGDWEQTAAYNLDQVLEQGGVSSLLQNLAVSVTPIQRIVRSGENALKIDIHVIIPYEGLSADQMAQIEEVFKVVYPVDDHHFKVILPYGTLVIDGVTPNMLNYFGRPYEGIAVFDGKKITVTGTLWNGNKIIDERLITPDGSMLFRVTINS

SEQ ID NO: 4086 - protein, 448 aa, Synthetic construct
MFHYVDVGPRDGTPVLFLHGNPTSSYVWRNIIPHVAPTHRCIAPDLIGMGKSDKPDLGYFFDDHVRFMDAFIEALGLEEVVLVIHDWGSALGFHWAKRNPERVKGIAFMEFIRPIPTWDEWPEFARETFQAFRTTDVGRKLIIDQNVFIEGTLPMGVVRPLTEVEMDHYREPFLNPVDREPLWRFANELPIAGEPANIVALVEEYMDWLHQSPVPKLLFWGTPGVLIPPAEAARLAKSLPNCKAVDIGPGLNLLQEDNPDLIGSEIARWLSTLEISGGSGGSGGGGSGGMVFTLEDFVGDWEQTAAYNLDQVLEQGGVSSLLQNLAVSVTPIQRIVRSGENALKIDIHVIIPYEGLSADQMAQIEEVFKVVYPVDDHHFKVILPYGTLVIDGVTPNMLNYFGRPYEGIAVFDGKKITVTGTLWNGNKIIDERLITPDGSMLFRVTINS

SEQ ID NO: 4087 - protein, 448 aa, Synthetic construct
MFHYVDVGPRDGTPVLFLHGNPTSSYVWRNIIPHVAPTHRCIAPDLIGMGKSDKPDLGYFFDDHVRFMDAFIEALGLEEVVLVIHDWGSALGFHWAKRNPERVKGIAFMEFIRPIPTWDEWPEFARETFQAFRTTDVGRKLIIDQNVFIEGTLPMGVVRPLTEVEMDHYREPFLNPVDREPLWRFVNELPIAGEPANIVALVEEYMDWLHQSPVPKLLFWGTPGVLIPPAEAARLAKSLPNCKAVDIGPGLNLLQEDNPDLIGSEIARWLSTLEISGGSGGSGGGGSGGMVFTLEDFVGDWEQTAAYNLDQVLEQGGVSSLLQNLAVSVTPIQRIVRSGENALKIDIHVIIPYEGLSADQMAQIEEVFKVVYPVDDHHFKVILPYGTLVIDGVTPNMLNYFGRPYEGIAVFDGKKITVTGTLWNGNKIIDERLITPDGSMLFRVTINS

SEQ ID NO: 4088 - protein, 448 aa, Synthetic construct
MFHYVDVGPRDGTPVLFLHGNPTSSYVWRNIIPHVAPTHRCIAPDLIGMGKSDKPDLGYFFDDHVRFMDAFIEALGLEEVVLVIHDWGSALGFHWAKRNPERVKGIAFMEFIRPIPTWDEWPEFARETFQAFRTTDVGRKLIIDQNVFIEGTLPMGVVRPLTEVEMDHYREPFLNPVDREPLWRFPNELPIAGEPANIVALVEEYMDWLHQSPVPKLLFWGTPGVLIPPAEAARLAKALPNCKAVDIGPGLNLLQEDNPDLIGSEIARWLSTLEISGGSGGSGGGGSGGMVFTLEDFVGDWEQTAAYNLDQVLEQGGVSSLLQNLAVSVTPIQRIVRSGENALKIDIHVIIPYEGLSADQMAQIEEVFKVVYPVDDHHFKVILPYGTLVIDGVTPNMLNYFGRPYEGIAVFDGKKITVTGTLWNGNKIIDERLITPDGSMLFRVTINS

SEQ ID NO: 4089 - protein, 448 aa, Synthetic construct
MFHYVDVGPRDGTPVLFLHGNPTSSYVWRNIIPHVAPTHRCIAPDLIGMGKSDKPDLGYFFDDHVRFMDAFIEALGLEEVVLVIHDWGSALGFHWAKRNPERVKGIAFMEFIRPIPTWDEWPEFARETFQAFRTTDVGRKLIIDQNVFIEGTLPMGVVRPLTEVEMDHYREPFLNPVDREPLWRFPNELPIAGEPANIVALVEEYMDWLHQSPVPKLLFWGTPGVLIPPAEAARLAKSLPNCKAVDIGPGLNILQEDNPDLIGSEIARWLSTLEISGGSGGSGGGGSGGMVFTLEDFVGDWEQTAAYNLDQVLEQGGVSSLLQNLAVSVTPIQRIVRSGENALKIDIHVIIPYEGLSADQMAQIEEVFKVVYPVDDHHFKVILPYGTLVIDGVTPNMLNYFGRPYEGIAVFDGKKITVTGTLWNGNKIIDERLITPDGSMLFRVTINS

SEQ ID NO: 4090 - protein, 284 aa, Synthetic construct
MVSKGEELFTGVVPILVELDGDVNGHKFSVSGEGEGDATYGKLTLKFICTTGKLPVPWPTLVTTLTYGVQCFSRYPDHMKQHDFFKSAMPEGYVQERTIFFKDDGNYKTRAEVKFEGDTLVNRIELKGIDFKEDGNILGHKLEYNYNSHNVYIMADKQKNGIKVNFKIRHNIEDGSVQLADHYQQNTPIGDGPVLLPDNHYLSTQSALSKDPNEKRDHMVLLEFVTAAGITLGMDELYKGGSGGGGSGGSSSGGEIGTGFPFDPHYVEVLGVSVSGWRLFKKIS

SEQ ID NO: 4091 - protein, 457 aa, Synthetic construct
MFHYVDVGPRDGTPVLFLHGNPTSSYVWRNIIPHVAPTHRCIAPDLIGMGKSDKPDLGYFFDDHVRFMDAFIEALGLEEVVLVIHDWGSALGFHWAKRNPERVKGIAFMEFIRPIPTWDEWPEFARETFQAFRTTDVGRKLIIDQNVFIEGTLPMGVVRPLTEVEMDHYREPFLNPVDREPLWRFPNELPIAGEPANIVALVEEYMDWLHQSPVPKLLFWGTPGVLIPPAEAARLAKSLPNCKAVDIGPGLNLLQEDNPDLIGSEIARWLSTLEISGGSGGSGGGGSGGMVFTLEDFVGDWEQTAAYNLDQVLEQGGVSSLLQNLAVSVTPIQRIVRSGENALKIDIHVIIPYEGLSADQMAQIEEVFKVVYPVDDHHFKVILPYGTLVIDGVTPNMLNYFGRPYEGIAVFDGKKITVTGTLWNGNKIIDERLITPDGSMLFRVTINSGSGHHHHHH

SEQ ID NO: 4092 - protein, 457 aa, Synthetic construct
MFHYVDVGPRDGTPVLFLHGNPTSSYVWRNIIPHVAPTHRCIAPDLIGMGKSGKPDLGYFFDDHVRFMDAFIEALGLEEVVLVIHDWGSALGFHWAKRNPERVKGIAFMEFIRPIPTWDEWPEFARETFQAFRTTDVGRKLIIDQNVMIEGTLPMGVVRPLTEVEMDHYREPFLNPVDREPLWRFPNELPIAGEPANIVALVEEYMDWLHQSPVPKLLFWGTPGVLIPPAEAARLAKSLPNCKAVDIGPGLNLLQEDNPDLIGSEIARWLSTLEISGGSGGSGGGGSGGMVFTLEDFVGDWEQTAAYNLDQVLEQGGVSSLLQNLAVSVTPIQRIVRSGENALKIDIHVIIPYEGLSADQMAQIEEVFKVVYPVDDHHFKVILPYGTLVIDGVTPNMLNYFGRPYEGIAVFDGKKITVTGTLWNGNKIIDERLITPDGSMLFRVTINSGSGHHHHHH

SEQ ID NO: 4093 - protein, 457 aa, Synthetic construct
MFHYVDVGPRDGTPVLFLHGNPTSSYVWRNIIPHVAPTHRCIAPDLIGMGKSGKPDLGYFFDDHVRFMDAFIEALGLEEVVLVIHDWGSALGFHWAKRNPERVKGIAFMEFIRPIPTWDEWPEFARETFQAFRTTDVGRKLIIDQNVFIEGTLPMGVVRPLTEVEMDHYREPFLNPEDREPLWRFPNELPIAGEPANIVALVEEYMDWLHQSPVPKLLFWGTPGVLIPPAEAARLAKSLPNCKAVDIGPGLNLLQEDNPDLIGSEIARWLSTLEISGGSGGSGGGGSGGMVFTLEDFVGDWEQTAAYNLDQVLEQGGVSSLLQNLAVSVTPIQRIVRSGENALKIDIHVIIPYEGLSADQMAQIEEVFKVVYPVDDHHFKVILPYGTLVIDGVTPNMLNYFGRPYEGIAVFDGKKITVTGTLWNGNKIIDERLITPDGSMLFRVTINSGSGHHHHHH

SEQ ID NO: 4094 - protein, 457 aa, Synthetic construct
MFHYVDVGPRDGTPVLFLHGNPTSSYVWRNIIPHVAPTHRCIAPDLIGMGKSDKPDLGYFFDDHVRFMDAFIEALGLEEVVLVIHDWGSALGFHWAKRNPERVKGIAFMEFIRPIPTWDEWPEFARETFQAFRTTDVGRKLIIDQNVMIEGTLPMGVVRPLTEVEMDHYREPFLNPEDREPLWRFPNELPIAGEPANIVALVEEYMDWLHQSPVPKLLFWGTPGVLIPPAEAARLAKSLPNCKAVDIGPGLNLLQEDNPDLIGSEIARWLSTLEISGGSGGSGGGGSGGMVFTLEDFVGDWEQTAAYNLDQVLEQGGVSSLLQNLAVSVTPIQRIVRSGENALKIDIHVIIPYEGLSADQMAQIEEVFKVVYPVDDHHFKVILPYGTLVIDGVTPNMLNYFGRPYEGIAVFDGKKITVTGTLWNGNKIIDERLITPDGSMLFRVTINSGSGHHHHHH

SEQ ID NO: 4095 - protein, 164 aa, Synthetic construct
MKHHHHHHGSGMGVQVETISPGDGRTFPKRGQTCVVHYTGMLEDGKKFDSSRDRNKPFKFMLGKQEVIRGWEEGVAQMSVGQRAKLTISPDYAYGATGHPGIIPPHATLVFDVELLKLEGGSGGGGSGGSSSGGEIGTGFPFDPHYVEVLGVSVSGWRLFKKIS

SEQ ID NO: 4096 - protein, 166 aa, Synthetic construct
MKHHHHHHGSGMGVQVETISPGDGRTFPKRGQTCVVHYTGMLEDGKKFDSSRDRNKPFKFMLGKQEVIRGWEEGVAQMSVGQRAKLTISPDYAYGATGHPGIIPPHATLVFDVELLKLEGGSGGGGSGGSSSGGEIGTGFPFDPHYVEVLGGGVSVSGWRLFKKIS

SEQ ID NO: 4097 - protein, 168 aa, Synthetic construct
MKHHHHHHGSGMGVQVETISPGDGRTFPKRGQTCVVHYTGMLEDGKKFDSSRDRNKPFKFMLGKQEVIRGWEEGVAQMSVGQRAKLTISPDYAYGATGHPGIIPPHATLVFDVELLKLEGGSGGGGSGGSSSGGEIGTGFPFDPHYVEVLGGGSGVSVSGWRLFKKIS

SEQ ID NO: 4098 - protein, 170 aa, Synthetic construct
MKHHHHHHGSGMGVQVETISPGDGRTFPKRGQTCVVHYTGMLEDGKKFDSSRDRNKPFKFMLGKQEVIRGWEEGVAQMSVGQRAKLTISPDYAYGATGHPGIIPPHATLVFDVELLKLEGGSGGGGSGGSSSGGEIGTGFPFDPHYVEVLGGGSGGSVSVSGWRLFKKIS

SEQ ID NO: 4099 - protein, 172 aa, Synthetic construct
MKHHHHHHGSGMGVQVETISPGDGRTFPKRGQTCVVHYTGMLEDGKKFDSSRDRNKPFKFMLGKQEVIRGWEEGVAQMSVGQRAKLTISPDYAYGATGHPGIIPPHATLVFDVELLKLEGGSGGGGSGGSSSGGEIGTGFPFDPHYVEVLGGGSGGSGGVSVSGWRLFKKIS

SEQ ID NO: 4100 - protein, 174 aa, Synthetic construct
MKHHHHHHGSGMGVQVETISPGDGRTFPKRGQTCVVHYTGMLEDGKKFDSSRDRNKPFKFMLGKQEVIRGWEEGVAQMSVGQRAKLTISPDYAYGATGHPGIIPPHATLVFDVELLKLEGGSGGGGSGGSSSGGEIGTGFPFDPHYVEVLGGGSGGGGSGGVSVSGWRLFKKIS

SEQ ID NO: 4101 - protein, 176 aa, Synthetic construct
MKHHHHHHGSGMGVQVETISPGDGRTFPKRGQTCVVHYTGMLEDGKKFDSSRDRNKPFKFMLGKQEVIRGWEEGVAQMSVGQRAKLTISPDYAYGATGHPGIIPPHATLVFDVELLKLEGGSGGGGSGGSSSGGEIGTGFPFDPHYVEVLGGGSGGGGSGGSGVSVSGWRLFKKIS

SEQ ID NO: 4102 - protein, 179 aa, Synthetic construct
MKHHHHHHGSGMGVQVETISPGDGRTFPKRGQTCVVHYTGMLEDGKKFDSSRDRNKPFKFMLGKQEVIRGWEEGVAQMSVGQRAKLTISPDYAYGATGHPGIIPPHATLVFDVELLKLEGGSGGGGSGGSSSGGEIGTGFPFDPHYVEVLGGGSGGGGSGGSSSGGVSVSGWRLFKKIS

SEQ ID NO: 4103 - protein, 164 aa, Synthetic construct
MKHHHHHHGSGMGVQVETISPGDGRTFPKRGQTCVVHYTGMLEDGKKFDSSRDRNKPFKFMLGKQEVIRGWEEGVAQMSVGQRAKLTISPDYAYGATGHPGIIPPHATLVFDVELLKLEGGSGGGGSGGSSSGGVSVSGWRLFKKISEIGTGFPFDPHYVEVLG

SEQ ID NO: 4104 - protein, 166 aa, Synthetic construct
MKHHHHHHGSGMGVQVETISPGDGRTFPKRGQTCVVHYTGMLEDGKKFDSSRDRNKPFKFMLGKQEVIRGWEEGVAQMSVGQRAKLTISPDYAYGATGHPGIIPPHATLVFDVELLKLEGGSGGGGSGGSSSGGVSVSGWRLFKKISGGEIGTGFPFDPHYVEVLG

SEQ ID NO: 4105 - protein, 168 aa, Synthetic construct
MKHHHHHHGSGMGVQVETISPGDGRTFPKRGQTCVVHYTGMLEDGKKFDSSRDRNKPFKFMLGKQEVIRGWEEGVAQMSVGQRAKLTISPDYAYGATGHPGIIPPHATLVFDVELLKLEGGSGGGGSGGSSSGGVSVSGWRLFKKISGGSGEIGTGFPFDPHYVEVLG

SEQ ID NO: 4106 - protein, 170 aa, Synthetic construct
MKHHHHHHGSGMGVQVETISPGDGRTFPKRGQTCVVHYTGMLEDGKKFDSSRDRNKPFKFMLGKQEVIRGWEEGVAQMSVGQRAKLTISPDYAYGATGHPGIIPPHATLVFDVELLKLEGGSGGGGSGGSSSGGVSVSGWRLFKKISGGSGGSEIGTGFPFDPHYVEVLG

SEQ ID NO: 4107 - protein, 172 aa, Synthetic construct
MKHHHHHHGSGMGVQVETISPGDGRTFPKRGQTCVVHYTGMLEDGKKFDSSRDRNKPFKFMLGKQEVIRGWEEGVAQMSVGQRAKLTISPDYAYGATGHPGIIPPHATLVFDVELLKLEGGSGGGGSGGSSSGGVSVSGWRLFKKISGGSGGSGGEIGTGFPFDPHYVEVLG

SEQ ID NO: 4108 - protein, 176 aa, Synthetic construct
MKHHHHHHGSGMGVQVETISPGDGRTFPKRGQTCVVHYTGMLEDGKKFDSSRDRNKPFKFMLGKQEVIRGWEEGVAQMSVGQRAKLTISPDYAYGATGHPGIIPPHATLVFDVELLKLEGGSGGGGSGGSSSGGVSVSGWRLFKKISGGSGGGGSGGSGEIGTGFPFDPHYVEVLG

SEQ ID NO: 4109 - protein, 166 aa, Synthetic construct
MKHHHHHHGSGMGVQVETISPGDGRTFPKRGQTCVVHYTGMLEDGKKFDSSRDRNKPFKFMLGKQEVIRGWEEGVAQMSVGQRAKLTISPDYAYGATGHPGIIPPHATLVFDVELLKLEGGSGGGGSGGSSSGGEIGTGFPFDPHYVEVLGAPVSVSGWRLFKKIS

SEQ ID NO: 4110 - protein, 166 aa, Synthetic construct
MKHHHHHHGSGMGVQVETISPGDGRTFPKRGQTCVVHYTGMLEDGKKFDSSRDRNKPFKFMLGKQEVIRGWEEGVAQMSVGQRAKLTISPDYAYGATGHPGIIPPHATLVFDVELLKLEGGSGGGGSGGSSSGGEIGTGFPFDPHYVEVLGKPVSVSGWRLFKKIS

SEQ ID NO: 4111 - protein, 166 aa, Synthetic construct
MKHHHHHHGSGMGVQVETISPGDGRTFPKRGQTCVVHYTGMLEDGKKFDSSRDRNKPFKFMLGKQEVIRGWEEGVAQMSVGQRAKLTISPDYAYGATGHPGIIPPHATLVFDVELLKLEGGSGGGGSGGSSSGGEIGTGFPFDPHYVEVLGEPVSVSGWRLFKKIS

SEQ ID NO: 4112 - protein, 169 aa, Synthetic construct
MKHHHHHHGSGMGVQVETISPGDGRTFPKRGQTCVVHYTGMLEDGKKFDSSRDRNKPFKFMLGKQEVIRGWEEGVAQMSVGQRAKLTISPDYAYGATGHPGIIPPHATLVFDVELLKLEGGSGGGGSGGSSSGGEIGTGFPFDPHYVEVLGPAPAPVSVSGWRLFKKIS

SEQ ID NO: 4113 - protein, 169 aa, Synthetic construct
MKHHHHHHGSGMGVQVETISPGDGRTFPKRGQTCVVHYTGMLEDGKKFDSSRDRNKPFKFMLGKQEVIRGWEEGVAQMSVGQRAKLTISPDYAYGATGHPGIIPPHATLVFDVELLKLEGGSGGGGSGGSSSGGEIGTGFPFDPHYVEVLGPKPKPVSVSGWRLFKKIS

SEQ ID NO: 4114 - protein, 169 aa, Synthetic construct
MKHHHHHHGSGMGVQVETISPGDGRTFPKRGQTCVVHYTGMLEDGKKFDSSRDRNKPFKFMLGKQEVIRGWEEGVAQMSVGQRAKLTISPDYAYGATGHPGIIPPHATLVFDVELLKLEGGSGGGGSGGSSSGGEIGTGFPFDPHYVEVLGPEPEPVSVSGWRLFKKIS

SEQ ID NO: 4115 - protein, 149 aa, Synthetic construct
MKHHHHHHGSGMGVQVETISPGDGRTFPKRGQTCVVHYTGMLEDGKKFDSSRDRNKPFKFMLGKQEVIRGWEEGVAQMSVGQRAKLTISPDYAYGATGHPGIIPPHATLVFDVELLKLEEIGTGFPFDPHYVEVLGVSVSGWRLFKKIS

SEQ ID NO: 4116 - protein, 153 aa, Synthetic construct
MKHHHHHHGSGMGVQVETISPGDGRTFPKRGQTCVVHYTGMLEDGKKFDSSRDRNKPFKFMLGKQEVIRGWEEGVAQMSVGQRAKLTISPDYAYGATGHPGIIPPHATLVFDVELLKLEGGSGEIGTGFPFDPHYVEVLGVSVSGWRLFKKIS

SEQ ID NO: 4117 - protein, 157 aa, Synthetic construct
MKHHHHHHGSGMGVQVETISPGDGRTFPKRGQTCVVHYTGMLEDGKKFDSSRDRNKPFKFMLGKQEVIRGWEEGVAQMSVGQRAKLTISPDYAYGATGHPGIIPPHATLVFDVELLKLEGGSGGGGSEIGTGFPFDPHYVEVLGVSVSGWRLFKKIS

SEQ ID NO: 4118 - protein, 169 aa, Synthetic construct
MKHHHHHHGSGMGVQVETISPGDGRTFPKRGQTCVVHYTGMLEDGKKFDSSRDRNKPFKFMLGKQEVIRGWEEGVAQMSVGQRAKLTISPDYAYGATGHPGIIPPHATLVFDVELLKLEGGSGGGGSGGSSSGGEIGTGFPFDPHYVEVLGVTINGVSVSGWRLFKKIS

SEQ ID NO: 4119 - protein, 163 aa, Synthetic construct
MKHHHHHHGSGMGVQVETISPGDGRTFPKRGQTCVVHYTGMLEDGKKFDSSRDRNKPFKFMLGKQEVIRGWEEGVAQMSVGQRAKLTISPDYAYGATGHPGIIPPHATLVFDVELLKLEGGSGGGGSGGSSSGGIGTGFPFDPHYVEVLGVSVSGWRLFKKIS

SEQ ID NO: 4120 - protein, 159 aa, Synthetic construct
MKHHHHHHGSGMGVQVETISPGDGRTFPKRGQTCVVHYTGMLEDGKKFDSSRDRNKPFKFMLGKQEVIRGWEEGVAQMSVGQRAKLTISPDYAYGATGHPGIIPPHATLVFDVELLKLEGGSGGGGSGGSSSGGFPFDPHYVEVLGVSVSGWRLFKKIS

SEQ ID NO: 4121 - protein, 163 aa, Synthetic construct
MKHHHHHHGSGMGVQVETISPGDGRTFPKRGQTCVVHYTGMLEDGKKFDSSRDRNKPFKFMLGKQEVIRGWEEGVAQMSVGQRAKLTISPDYAYGATGHPGIIPPHATLVFDVELLKLEGGSGGGGSGGSSSGGEIGTGFPFDPHYVEVLVSVSGWRLFKKIS

SEQ ID NO: 4122 - protein, 162 aa, Synthetic construct
MKHHHHHHGSGMGVQVETISPGDGRTFPKRGQTCVVHYTGMLEDGKKFDSSRDRNKPFKFMLGKQEVIRGWEEGVAQMSVGQRAKLTISPDYAYGATGHPGIIPPHATLVFDVELLKLEGGSGGGGSGGSSSGGIGTGFPFDPHYVEVLVSVSGWRLFKKIS

SEQ ID NO: 4123 - protein, 162 aa, Synthetic construct
MKHHHHHHGSGMGVQVETISPGDGRTFPKRGQTCVVHYTGMLEDGKKFDSSRDRNKPFKFMLGKQEVIRGWEEGVAQMSVGQRAKLTISPDYAYGATGHPGIIPPHATLVFDVELLKLEGGSGGGGSGGSSSGGEIGTGFPFDPHYVEVVSVSGWRLFKKIS

SEQ ID NO: 4124 - protein, 161 aa, Synthetic construct
MKHHHHHHGSGMGVQVETISPGDGRTFPKRGQTCVVHYTGMLEDGKKFDSSRDRNKPFKFMLGKQEVIRGWEEGVAQMSVGQRAKLTISPDYAYGATGHPGIIPPHATLVFDVELLKLEGGSGGGGSGGSSSGGIGTGFPFDPHYVEVVSVSGWRLFKKIS

SEQ ID NO: 4125 - protein, 157 aa, Synthetic construct
MKHHHHHHGSGMGVQVETISPGDGRTFPKRGQTCVVHYTGMLEDGKKFDSSRDRNKPFKFMLGKQEVIRGWEEGVAQMSVGQRAKLTISPDYAYGATGHPGIIPPHATLVFDVELLKLEGGSGGGGSGGSSSGGFPFDPHYVEVVSVSGWRLFKKIS

SEQ ID NO: 4126 - protein, 164 aa, Synthetic construct
MKHHHHHHGSGMGVQVETISPGDGRTFPKRGQTCVVHYTGMLEDGKKFDSSRDRNKPFKFMLGKQEVIRGWEEGVAQMSVGQRAKLTISPDYAYGATGHPGIIPPHATLVFDVELLKLEGGSGGGGSGGSSSGGEIGTGFPFDPHYVEVLGVSVSGWRLFRRIS

SEQ ID NO: 4127 - protein, 168 aa, Synthetic construct
MKHHHHHHGSGMGVQVETISPGDGRTFPKRGQTCVVHYTGMLEDGKKFDSSRDRNKPFKFMLGKQEVIRGWEEGVAQMSVGQRAKLTISPDYAYGATGHPGIIPPHATLVFDVELLKLEGGSGGGGSGGSSSGGEIGTGFPFDPHYVEVLGGGSGVSVSGWRLFRRIS

SEQ ID NO: 4128 - protein, 164 aa, Synthetic construct
MKHHHHHHGSGMGVQVETISPGDGRTFPKRGQTCVVHYTGMLEDGKKFDSSRDRNKPFKFMLGKQEVIRGWEEGVAQMSVGQRAKLTISPDYAYGATGHPGIIPPHATLVFDVELLKLEGGSGGGGSGGSSSGGVSVSGWRLFRRISEIGTGFPFDPHYVEVLG

SEQ ID NO: 4129 - protein, 168 aa, Synthetic construct
MKHHHHHHGSGMGVQVETISPGDGRTFPKRGQTCVVHYTGMLEDGKKFDSSRDRNKPFKFMLGKQEVIRGWEEGVAQMSVGQRAKLTISPDYAYGATGHPGIIPPHATLVFDVELLKLEGGSGGGGSGGSSSGGVSVSGWRLFRRISGGSGEIGTGFPFDPHYVEVLG

SEQ ID NO: 4130 - protein, 174 aa, Synthetic construct
MKHHHHHHGSGMGVQVETISPGDGRTFPKRGQTCVVHYTGMLEDGKKFDSSRDRNKPFKFMLGKQEVIRGWEEGVAQMSVGQRAKLTISPDYAYGATGHPGIIPPHATLVFDVELLKLEGGSGGGGSGGSSSGGVSVSGWRLFRRISGGSGGGGSGGEIGTGFPFDPHYVEVLG

SEQ ID NO: 4131 - protein, 161 aa, Synthetic construct
MVFTLEDFVGDWEQTAAYNLDQVLEQGGVSSLLQNLAVSVTPIQRIVRSGENALKIDIHVIIPYEGLSADQMAQIEEVFKVVYPVDDHHFKVILPYGTLVIDGVTPNMLNYFGRPYEGIAVFDGKKITVTGTLWNGNKIIDERLITPDGSMLFRVTINSGS

SEQ ID NO: 4132 - protein, 457 aa, Synthetic construct
MFHYVDVGPRDGTPVLFLHGNPTSSYVWRNIIPHVAPTHRCIAPDLIGFGKSSKPDLGYFFDDHVRFMDAFIEALGLEEVVLVIHDWGSALGFHWAKRNPERVKGIAFMEFIRPIPTWDEWPEFARETFQAFRTTDVGRKLIIDQNVFIEGTLPMGVVRPLTEVEMDHYREPFLNPEDREPLWRFPNELPIAGEPANIVALVEEYMDWLHQSPVPKLLFWGTPGVLIPPAEAARLAKSLPNCKAVDIGPGLNLLQEDNPDLIGSEIARWLSTLEISGGSGGSGGGGSGGMVFTLEDFVGDWEQTAAYNLDQVLEQGGVSSLLQNLAVSVTPIQRIVRSGENALKIDIHVIIPYEGLSADQMAQIEEVFKVVYPVDDHHFKVILPYGTLVIDGVTPNMLNYFGRPYEGIAVFDGKKITVTGTLWNGNKIIDERLITPDGSMLFRVTINSGSGHHHHHH

SEQ ID NO: 4133 - protein, 164 aa, Synthetic construct
MQLLRCFSIFSVIASVLAQELTTICEQIPSPTLESTPYSLSTTTILANGKAMQGVFEYYKSVTFVSNCGSHPSTTSKGSPINTQYVFKDNSSTIEGRYPYDVPDYALQASGGGGSGGGGSGGGGSMGGSGEIGTGFPFDPHYVEVLGGGSGVSVSGWRLFKKIS

SEQ ID NO: 4134 - protein, 165 aa, Synthetic construct
MEIGTGFPFDPHYVEVLGVSVSGWRLFKKISGGSGGGGSGGSSSGGMGVQVETISPGDGRTFPKRGQTCVVHYTGMLEDGKKFDSSRDRNKPFKFMLGKQEVIRGWEEGVAQMSVGQRAKLTISPDYAYGATGHPGIIPPHATLVFDVELLKLEGSGSGHHHHHH

SEQ ID NO: 4135 - protein, 169 aa, Synthetic construct
MEIGTGFPFDPHYVEVLGGGSGVSVSGWRLFKKISGGSGGGGSGGSSSGGMGVQVETISPGDGRTFPKRGQTCVVHYTGMLEDGKKFDSSRDRNKPFKFMLGKQEVIRGWEEGVAQMSVGQRAKLTISPDYAYGATGHPGIIPPHATLVFDVELLKLEGSGSGHHHHHH

SEQ ID NO: 4136 - protein, 171 aa, Synthetic construct
MEIGTGFPFDPHYVEVLGGGSGGSVSVSGWRLFKKISGGSGGGGSGGSSSGGMGVQVETISPGDGRTFPKRGQTCVVHYTGMLEDGKKFDSSRDRNKPFKFMLGKQEVIRGWEEGVAQMSVGQRAKLTISPDYAYGATGHPGIIPPHATLVFDVELLKLEGSGSGHHHHHH

SEQ ID NO: 4137 - protein, 173 aa, Synthetic construct
MEIGTGFPFDPHYVEVLGGGSGGSGGVSVSGWRLFKKISGGSGGGGSGGSSSGGMGVQVETISPGDGRTFPKRGQTCVVHYTGMLEDGKKFDSSRDRNKPFKFMLGKQEVIRGWEEGVAQMSVGQRAKLTISPDYAYGATGHPGIIPPHATLVFDVELLKLEGSGSGHHHHHH

SEQ ID NO: 4138 - protein, 175 aa, Synthetic construct
MEIGTGFPFDPHYVEVLGGGSGGGGSGGVSVSGWRLFKKISGGSGGGGSGGSSSGGMGVQVETISPGDGRTFPKRGQTCVVHYTGMLEDGKKFDSSRDRNKPFKFMLGKQEVIRGWEEGVAQMSVGQRAKLTISPDYAYGATGHPGIIPPHATLVFDVELLKLEGSGSGHHHHHH

SEQ ID NO: 4139 - protein, 177 aa, Synthetic construct
MEIGTGFPFDPHYVEVLGGGSGGGGSGGSGVSVSGWRLFKKISGGSGGGGSGGSSSGGMGVQVETISPGDGRTFPKRGQTCVVHYTGMLEDGKKFDSSRDRNKPFKFMLGKQEVIRGWEEGVAQMSVGQRAKLTISPDYAYGATGHPGIIPPHATLVFDVELLKLEGSGSGHHHHHH

SEQ ID NO: 4140 - protein, 180 aa, Synthetic construct
MEIGTGFPFDPHYVEVLGGGSGGGGSGGSSSGGVSVSGWRLFKKISGGSGGGGSGGSSSGGMGVQVETISPGDGRTFPKRGQTCVVHYTGMLEDGKKFDSSRDRNKPFKFMLGKQEVIRGWEEGVAQMSVGQRAKLTISPDYAYGATGHPGIIPPHATLVFDVELLKLEGSGSGHHHHHH

SEQ ID NO: 4141 - protein, 165 aa, Synthetic construct
MVSVSGWRLFKKISEIGTGFPFDPHYVEVLGGGSGGGGSGGSSSGGMGVQVETISPGDGRTFPKRGQTCVVHYTGMLEDGKKFDSSRDRNKPFKFMLGKQEVIRGWEEGVAQMSVGQRAKLTISPDYAYGATGHPGIIPPHATLVFDVELLKLEGSGSGHHHHHH

SEQ ID NO: 4142 - protein, 167 aa, Synthetic construct
MVSVSGWRLFKKISGGEIGTGFPFDPHYVEVLGGGSGGGGSGGSSSGGMGVQVETISPGDGRTFPKRGQTCVVHYTGMLEDGKKFDSSRDRNKPFKFMLGKQEVIRGWEEGVAQMSVGQRAKLTISPDYAYGATGHPGIIPPHATLVFDVELLKLEGSGSGHHHHHH

SEQ ID NO: 4143 - protein, 169 aa, Synthetic construct
MVSVSGWRLFKKISGGSGEIGTGFPFDPHYVEVLGGGSGGGGSGGSSSGGMGVQVETISPGDGRTFPKRGQTCVVHYTGMLEDGKKFDSSRDRNKPFKFMLGKQEVIRGWEEGVAQMSVGQRAKLTISPDYAYGATGHPGIIPPHATLVFDVELLKLEGSGSGHHHHHH

SEQ ID NO: 4144 - protein, 171 aa, Synthetic construct
MVSVSGWRLFKKISGGSGGSEIGTGFPFDPHYVEVLGGGSGGGGSGGSSSGGMGVQVETISPGDGRTFPKRGQTCVVHYTGMLEDGKKFDSSRDRNKPFKFMLGKQEVIRGWEEGVAQMSVGQRAKLTISPDYAYGATGHPGIIPPHATLVFDVELLKLEGSGSGHHHHHH

SEQ ID NO: 4145 - protein, 173 aa, Synthetic construct
MVSVSGWRLFKKISGGSGGSGGEIGTGFPFDPHYVEVLGGGSGGGGSGGSSSGGMGVQVETISPGDGRTFPKRGQTCVVHYTGMLEDGKKFDSSRDRNKPFKFMLGKQEVIRGWEEGVAQMSVGQRAKLTISPDYAYGATGHPGIIPPHATLVFDVELLKLEGSGSGHHHHHH

SEQ ID NO: 4146 - protein, 175 aa, Synthetic construct
MVSVSGWRLFKKISGGSGGGGSGGEIGTGFPFDPHYVEVLGGGSGGGGSGGSSSGGMGVQVETISPGDGRTFPKRGQTCVVHYTGMLEDGKKFDSSRDRNKPFKFMLGKQEVIRGWEEGVAQMSVGQRAKLTISPDYAYGATGHPGIIPPHATLVFDVELLKLEGSGSGHHHHHH

SEQ ID NO: 4147 - protein, 167 aa, Synthetic construct
MEIGTGFPFDPHYVEVLGAPVSVSGWRLFKKISGGSGGGGSGGSSSGGMGVQVETISPGDGRTFPKRGQTCVVHYTGMLEDGKKFDSSRDRNKPFKFMLGKQEVIRGWEEGVAQMSVGQRAKLTISPDYAYGATGHPGIIPPHATLVFDVELLKLEGSGSGHHHHHH

SEQ ID NO: 4148 - protein, 167 aa, Synthetic construct
MEIGTGFPFDPHYVEVLGKPVSVSGWRLFKKISGGSGGGGSGGSSSGGMGVQVETISPGDGRTFPKRGQTCVVHYTGMLEDGKKFDSSRDRNKPFKFMLGKQEVIRGWEEGVAQMSVGQRAKLTISPDYAYGATGHPGIIPPHATLVFDVELLKLEGSGSGHHHHHH

SEQ ID NO: 4149 - protein, 167 aa, Synthetic construct
MEIGTGFPFDPHYVEVLGEPVSVSGWRLFKKISGGSGGGGSGGSSSGGMGVQVETISPGDGRTFPKRGQTCVVHYTGMLEDGKKFDSSRDRNKPFKFMLGKQEVIRGWEEGVAQMSVGQRAKLTISPDYAYGATGHPGIIPPHATLVFDVELLKLEGSGSGHHHHHH

SEQ ID NO: 4150 - protein, 170 aa, Synthetic construct
MEIGTGFPFDPHYVEVLGPAPAPVSVSGWRLFKKISGGSGGGGSGGSSSGGMGVQVETISPGDGRTFPKRGQTCVVHYTGMLEDGKKFDSSRDRNKPFKFMLGKQEVIRGWEEGVAQMSVGQRAKLTISPDYAYGATGHPGIIPPHATLVFDVELLKLEGSGSGHHHHHH

SEQ ID NO: 4151 - protein, 170 aa, Synthetic construct
MEIGTGFPFDPHYVEVLGPKPKPVSVSGWRLFKKISGGSGGGGSGGSSSGGMGVQVETISPGDGRTFPKRGQTCVVHYTGMLEDGKKFDSSRDRNKPFKFMLGKQEVIRGWEEGVAQMSVGQRAKLTISPDYAYGATGHPGIIPPHATLVFDVELLKLEGSGSGHHHHHH

SEQ ID NO: 4152 - protein, 182 aa, Synthetic construct
MEIGTGFPFDPHYVEVLGAEAAAKEAAAKEAAAKAVSVSGWRLFKKISGGSGGGGSGGSSSGGMGVQVETISPGDGRTFPKRGQTCVVHYTGMLEDGKKFDSSRDRNKPFKFMLGKQEVIRGWEEGVAQMSVGQRAKLTISPDYAYGATGHPGIIPPHATLVFDVELLKLEGSGSGHHHHHH

SEQ ID NO: 4153 - protein, 150 aa, Synthetic construct
MEIGTGFPFDPHYVEVLGVSVSGWRLFKKISMGVQVETISPGDGRTFPKRGQTCVVHYTGMLEDGKKFDSSRDRNKPFKFMLGKQEVIRGWEEGVAQMSVGQRAKLTISPDYAYGATGHPGIIPPHATLVFDVELLKLEGSGSGHHHHHH

SEQ ID NO: 4154 - protein, 154 aa, Synthetic construct
MEIGTGFPFDPHYVEVLGVSVSGWRLFKKISGGSGMGVQVETISPGDGRTFPKRGQTCVVHYTGMLEDGKKFDSSRDRNKPFKFMLGKQEVIRGWEEGVAQMSVGQRAKLTISPDYAYGATGHPGIIPPHATLVFDVELLKLEGSGSGHHHHHH

SEQ ID NO: 4155 - protein, 158 aa, Synthetic construct
MEIGTGFPFDPHYVEVLGVSVSGWRLFKKISGGSGGGGSMGVQVETISPGDGRTFPKRGQTCVVHYTGMLEDGKKFDSSRDRNKPFKFMLGKQEVIRGWEEGVAQMSVGQRAKLTISPDYAYGATGHPGIIPPHATLVFDVELLKLEGSGSGHHHHHH

SEQ ID NO: 4156 - protein, 170 aa, Synthetic construct
MEIGTGFPFDPHYVEVLGVTINGVSVSGWRLFKKISGGSGGGGSGGSSSGGMGVQVETISPGDGRTFPKRGQTCVVHYTGMLEDGKKFDSSRDRNKPFKFMLGKQEVIRGWEEGVAQMSVGQRAKLTISPDYAYGATGHPGIIPPHATLVFDVELLKLEGSGSGHHHHHH

SEQ ID NO: 4157 - protein, 168 aa, Synthetic construct
MEIGTGFPFDPHYVEVLGINGVSVSGWRLFKKISGGSGGGGSGGSSSGGMGVQVETISPGDGRTFPKRGQTCVVHYTGMLEDGKKFDSSRDRNKPFKFMLGKQEVIRGWEEGVAQMSVGQRAKLTISPDYAYGATGHPGIIPPHATLVFDVELLKLEGSGSGHHHHHH

SEQ ID NO: 4158 - protein, 164 aa, Synthetic construct
MIGTGFPFDPHYVEVLGVSVSGWRLFKKISGGSGGGGSGGSSSGGMGVQVETISPGDGRTFPKRGQTCVVHYTGMLEDGKKFDSSRDRNKPFKFMLGKQEVIRGWEEGVAQMSVGQRAKLTISPDYAYGATGHPGIIPPHATLVFDVELLKLEGSGSGHHHHHH

SEQ ID NO: 4159 - protein, 160 aa, Synthetic construct
MFPFDPHYVEVLGVSVSGWRLFKKISGGSGGGGSGGSSSGGMGVQVETISPGDGRTFPKRGQTCVVHYTGMLEDGKKFDSSRDRNKPFKFMLGKQEVIRGWEEGVAQMSVGQRAKLTISPDYAYGATGHPGIIPPHATLVFDVELLKLEGSGSGHHHHHH

SEQ ID NO: 4160 - protein, 164 aa, Synthetic construct
MEIGTGFPFDPHYVEVLVSVSGWRLFKKISGGSGGGGSGGSSSGGMGVQVETISPGDGRTFPKRGQTCVVHYTGMLEDGKKFDSSRDRNKPFKFMLGKQEVIRGWEEGVAQMSVGQRAKLTISPDYAYGATGHPGIIPPHATLVFDVELLKLEGSGSGHHHHHH

SEQ ID NO: 4161 - protein, 163 aa, Synthetic construct
MIGTGFPFDPHYVEVLVSVSGWRLFKKISGGSGGGGSGGSSSGGMGVQVETISPGDGRTFPKRGQTCVVHYTGMLEDGKKFDSSRDRNKPFKFMLGKQEVIRGWEEGVAQMSVGQRAKLTISPDYAYGATGHPGIIPPHATLVFDVELLKLEGSGSGHHHHHH

SEQ ID NO: 4162 - protein, 159 aa, Synthetic construct
MFPFDPHYVEVLVSVSGWRLFKKISGGSGGGGSGGSSSGGMGVQVETISPGDGRTFPKRGQTCVVHYTGMLEDGKKFDSSRDRNKPFKFMLGKQEVIRGWEEGVAQMSVGQRAKLTISPDYAYGATGHPGIIPPHATLVFDVELLKLEGSGSGHHHHHH

SEQ ID NO: 4163 - protein, 163 aa, Synthetic construct
MEIGTGFPFDPHYVEVVSVSGWRLFKKISGGSGGGGSGGSSSGGMGVQVETISPGDGRTFPKRGQTCVVHYTGMLEDGKKFDSSRDRNKPFKFMLGKQEVIRGWEEGVAQMSVGQRAKLTISPDYAYGATGHPGIIPPHATLVFDVELLKLEGSGSGHHHHHH

SEQ ID NO: 4164 - protein, 162 aa, Synthetic construct
MIGTGFPFDPHYVEVVSVSGWRLFKKISGGSGGGGSGGSSSGGMGVQVETISPGDGRTFPKRGQTCVVHYTGMLEDGKKFDSSRDRNKPFKFMLGKQEVIRGWEEGVAQMSVGQRAKLTISPDYAYGATGHPGIIPPHATLVFDVELLKLEGSGSGHHHHHH

SEQ ID NO: 4165 - protein, 158 aa, Synthetic construct
MFPFDPHYVEVVSVSGWRLFKKISGGSGGGGSGGSSSGGMGVQVETISPGDGRTFPKRGQTCVVHYTGMLEDGKKFDSSRDRNKPFKFMLGKQEVIRGWEEGVAQMSVGQRAKLTISPDYAYGATGHPGIIPPHATLVFDVELLKLEGSGSGHHHHHH

SEQ ID NO: 4166 - protein, 165 aa, Synthetic construct
MEIGTGFPFDPHYVEVLGVSVSGWRLFRRISGGSGGGGSGGSSSGGMGVQVETISPGDGRTFPKRGQTCVVHYTGMLEDGKKFDSSRDRNKPFKFMLGKQEVIRGWEEGVAQMSVGQRAKLTISPDYAYGATGHPGIIPPHATLVFDVELLKLEGSGSGHHHHHH

SEQ ID NO: 4167 - protein, 169 aa, Synthetic construct
MEIGTGFPFDPHYVEVLGGGSGVSVSGWRLFRRISGGSGGGGSGGSSSGGMGVQVETISPGDGRTFPKRGQTCVVHYTGMLEDGKKFDSSRDRNKPFKFMLGKQEVIRGWEEGVAQMSVGQRAKLTISPDYAYGATGHPGIIPPHATLVFDVELLKLEGSGSGHHHHHH

SEQ ID NO: 4168 - protein, 165 aa, Synthetic construct
MVSVSGWRLFRRISEIGTGFPFDPHYVEVLGGGSGGGGSGGSSSGGMGVQVETISPGDGRTFPKRGQTCVVHYTGMLEDGKKFDSSRDRNKPFKFMLGKQEVIRGWEEGVAQMSVGQRAKLTISPDYAYGATGHPGIIPPHATLVFDVELLKLEGSGSGHHHHHH

SEQ ID NO: 4169 - protein, 169 aa, Synthetic construct
MVSVSGWRLFRRISGGSGEIGTGFPFDPHYVEVLGGGSGGGGSGGSSSGGMGVQVETISPGDGRTFPKRGQTCVVHYTGMLEDGKKFDSSRDRNKPFKFMLGKQEVIRGWEEGVAQMSVGQRAKLTISPDYAYGATGHPGIIPPHATLVFDVELLKLEGSGSGHHHHHH

SEQ ID NO: 4170 - protein, 175 aa, Synthetic construct
MVSVSGWRLFRRISGGSGGGGSGGEIGTGFPFDPHYVEVLGGGSGGGGSGGSSSGGMGVQVETISPGDGRTFPKRGQTCVVHYTGMLEDGKKFDSSRDRNKPFKFMLGKQEVIRGWEEGVAQMSVGQRAKLTISPDYAYGATGHPGIIPPHATLVFDVELLKLEGSGSGHHHHHH

SEQ ID NO: 4171 - protein, 402 aa, Synthetic construct
MQLLRCFSIFSVIASVLAQELTTICEQIPSPTLESTPYSLSTTTILANGKAMQGVFEYYKSVTFVSNCGSHPSTTSKGSPINTQYVFKDNSSTIEGRYPYDVPDYALQASGGGGSGGGGSGGGGSMVSKGEELFTGVVPILVELDGDVNGHKFSVSGEGEGDATYGKLTLKFICTTGKLPVPWPTLVTTLTYGVQCFSRYPDHMKQHDFFKSAMPEGYVQERTIFFKDDGNYKTRAEVKFEGDTLVNRIELKGIDFKEDGNILGHKLEYNYNSHNVYIMADKQKNGIKVNFKIRHNIEDGSVQLADHYQQNTPIGDGPVLLPDNHYLSTQSALSKDPNEKRDHMVLLEFVTAAGITLGMDELYKGGSGEIGTGFPFDPHYVEVLGGGSGNVSGWRLFKKISN

SEQ ID NO: 4172 - protein, 402 aa, Synthetic construct
MQLLRCFSIFSVIASVLAQELTTICEQIPSPTLESTPYSLSTTTILANGKAMQGVFEYYKSVTFVSNCGSHPSTTSKGSPINTQYVFKDNSSTIEGRYPYDVPDYALQASGGGGSGGGGSGGGGSMVSKGEELFTGVVPILVELDGDVNGHKFSVSGEGEGDATYGKLTLKFICTTGKLPVPWPTLVTTLTYGVQCFSRYPDHMKQHDFFKSAMPEGYVQERTIFFKDDGNYKTRAEVKFEGDTLVNRIELKGIDFKEDGNILGHKLEYNYNSHNVYIMADKQKNGIKVNFKIRHNIEDGSVQLADHYQQNTPIGDGPVLLPDNHYLSTQSALSKDPNEKRDHMVLLEFVTAAGITLGMDELYKGGSGEIGTGFPFDPHYVEVLGGGSGNVTGYRLFKKISN

SEQ ID NO: 4173 - protein, 400 aa, Synthetic construct
MQLLRCFSIFSVIASVLAQELTTICEQIPSPTLESTPYSLSTTTILANGKAMQGVFEYYKSVTFVSNCGSHPSTTSKGSPINTQYVFKDNSSTIEGRYPYDVPDYALQASGGGGSGGGGSGGGGSMVSKGEELFTGVVPILVELDGDVNGHKFSVSGEGEGDATYGKLTLKFICTTGKLPVPWPTLVTTLTYGVQCFSRYPDHMKQHDFFKSAMPEGYVQERTIFFKDDGNYKTRAEVKFEGDTLVNRIELKGIDFKEDGNILGHKLEYNYNSHNVYIMADKQKNGIKVNFKIRHNIEDGSVQLADHYQQNTPIGDGPVLLPDNHYLSTQSALSKDPNEKRDHMVLLEFVTAAGITLGMDELYKGGSGEIGTGFPFDPHYVEVLGGGSGVTGYRLFEKIS

SEQ ID NO: 4174 - protein, 402 aa, Synthetic construct
MQLLRCFSIFSVIASVLAQELTTICEQIPSPTLESTPYSLSTTTILANGKAMQGVFEYYKSVTFVSNCGSHPSTTSKGSPINTQYVFKDNSSTIEGRYPYDVPDYALQASGGGGSGGGGSGGGGSMVSKGEELFTGVVPILVELDGDVNGHKFSVSGEGEGDATYGKLTLKFICTTGKLPVPWPTLVTTLTYGVQCFSRYPDHMKQHDFFKSAMPEGYVQERTIFFKDDGNYKTRAEVKFEGDTLVNRIELKGIDFKEDGNILGHKLEYNYNSHNVYIMADKQKNGIKVNFKIRHNIEDGSVQLADHYQQNTPIGDGPVLLPDNHYLSTQSALSKDPNEKRDHMVLLEFVTAAGITLGMDELYKGGSGEIGTGFPFDPHYVEVLGGGSGVSVSGWRLFKKIS

SEQ ID NO: 4175 - protein, 457 aa, Synthetic construct; identical to SEQ ID NO: 3566

SEQ ID NO: 4176 - protein, 457 aa, Synthetic construct
MFHYVDVGPRDGTPVLFLHGNPTSSYVWRNIIPHVAPTHRCIAPDLIGMGKSGKPDLGYFFDDHVRFMDAFIEALGLEEVVLVIHDWGSALGFHWAKRNPERVKGIAFMEFIRPIPTWDEWPEFARETFQAFRTTDVGRELIIDQNVFIEGTLPMGVVRPLTEVEMDHYREPFLNPVDREPLWRFPNELPIAGEPANIVALVEEYMDWLHQSPVPKLLFWGTPGVLIPPAEAARLAKSLPNCKAVDIGPGLNLLQEDNPDLIGSEIARWLSTLEISGGSGGSGGGGSGGMVFTLEDFVGDWEQTAAYNLDQVLEQGGVSSLLQNLAVSVTPIQRIVRSGENALKIDIHVIIPYEGLSADQMAQIEEVFKVVYPVDDHHFKVILPYGTLVIDGVTPNMLNYFGRPYEGIAVFDGKKITVTGTLWNGNKIIDERLITPDGSMLFRVTINSGSGHHHHHH
